United States Patent Application Publication US 2025/0195589 A1 - sequence listing, part 7

SEQ ID NO: 14 - DNA, 2326801 bp, Lactobacillus crispatus
  source 1..2326801: mol_type = genomic DNA
ttgttcgacattaataaattttgggaacactttaatgacgagatgcgtgctcgtttcaacgaagttgcctacaatgcatggttcaaaaatactaaacctatttcatataatggaaaaacacatgaattaaaaattttagttcaaaatcctgtttctaaaggttactgggaaaagaatctatcttctcaattgattcaatctgcctacggttatgccgacatcgagatcttacctgtatttaaaatatctgaagatgcggatattacagaaaggatcgtaacacctgcgccaaagcgtgaagcgcaagttcaacagcctaatttgccagaaaaagaattcactaaagacttgaagttaaacgaaaaatacacttttgataacttcgttcaaggtgagggaaacaagttggccgccggtgctgcacttgctgtagccgacagtcctggtagtttttacaatcctttatttatttttggtggcgttggtttaggtaaaacacacctgatgcaagctgttgggcatcaaatgctagcagagcgacctaacgcaaaagttgtctatatacagagtgaaacttttgttaatgacttcattaattccatcaaaaataaaacgcaggacaaattccgcgaaaaatacagaacttgtgacctgcttttagttgatgatattcaattttttgcaaaaaaagaggggattcaagaggaattcttccatacttttgagacactttataacgatcaaaaacagatcgtaatgactagcgatcggttgcctacagaaatcccagatctatcagagcgtttagtttctcgatttacatggggcttgcaagtcgaaattacgcctcccgatttggaaaccagaatcgctattttgcgacgcaaagctgaaacagaaggttggactatcgatgatggtacgcttaactatattgcatctcaagttgatactaatattagagaacttgaaggggctttagttaaagttcaagcttatgccacaattgaaaaagcagatattgacgttaaccttgcgcgtgaagcattagttgacctcaaattagttcaaaaaaatcgtggattacaaatctctaaaatacaggaggttgtcgcaaactatttccaaacttcaactgctgaattaaagggtaaaaagcgtgtacggcagattgtagttcctcggcaaatagcaatgtatctttctcgtgaattaacagatgccagtttgccaaaaattggtcaagaatttgggggaaaagatcataccactgtcatgcatgcttatgataaaatcgacaagcagatgaaacttgattctgatatcaaaactgctgtctttgacctaaagcaaattttggagcactaaaagttatccactgtggaaaaataaacaagttttacacaagtttttaaccgtaacaagtccgttattttaggcttcttatgagttttcaacagaactcacaggccctactactactaattaattatataattactaataaagagaaatcacacagctattcttgggaggaaaaacatgaagtttacaattaatcgcaatctgtttatcgaaaacctcaataatgtaatgcgggccatctcatcaagagctactattccaattcttagtggaattaagttagacttaacagaagataaacttacgctaaccggtagtgatacagatatttcaattgaaattcaaattccagtcaatgatgatttaaatgtggaatctacaggttctattgttttaccagctagattctttagtgaaatcgtaaaaaaattgcctggtaaagacttctcatttgaagtaaaagaaagttttcaaactcagatcatatctgaaaatagtgaatttacaattaatggtttagatgctaataactatccacgtttaccagaaatttcagatgctgcttcattcactatttctggtaaaactttccgtgaaatcattaatgaaacgcaatttgctacttccaatgatcaaacacgagcaattttaactggggtacgtttcttctttagtccagataaaattaaagctgtcgcaactgattcccaccgtttatctcaaagaacaattgctttagaaaacggacctcaagctgaaactgatttgattattcctggtaaaagtttgcaggaattagctagaatcattggtgaagctgatccagaagttaaagtttgcccaggtgataaccaagctttatttgtaattggcaacttgtccttctattcacgtcttttggacggaaattatccagacactgatcgcttgattccgactgaaaagaccactagtgttgaatttgacatttccgaattatctagtgcccttgaacgtgccagtttgttaactcatgctggccgtaacaacgtggttactttgactttagatgtagaaaatcaatcagctaagttatcaggtaaatctgcggaaattggtaatgttgaagaagatgttagcttcagaaatcttgaaggaaacaatttagagatttccttcaaccctgactatatgcgtgatgcgttaagagcttcagtaacagattctgtaattatgagttttactaagccacttcgtccatttatcattaatccagataaagaagacattgaatttgtgcaattaattacgccagttagaacatattaatcaagtacacaatatttaggtcataaaaagtcgtcaaataaggcgactttttattttgcttttaaacgaaaacgcaaaatattggcgtatatttatttttttaccgtgctagtgtgattaggttattttaaaaaaaagctctgaaaaggcttataagagcgatttagtttgttatttgtgttgaaaactaatataattatataggtataaagcgtattgaaggtgagcattattaagtattttaaagttgacggcgatcatattactttggggcaattcctgaaggaagagagcattatttcatcaggtggacaagctaaatggtacttaaaagataatccagtaactttaaatggtgaacttgaagatcgaagaggcaaaaagatgcatgttggtgatcatatagtggttaatggccaagaatatgagtttcggtagggaagtcaatgtatcttgatcattttactgtacagaattttcgtaatttaaaaaagcttgacgtaaattttgattcaaacgtcaatatttttattggcaaaaatgctcagggcaagaccaatttgctagaggcaatctattttttagcattaacacgttcacataggaccaataatgataaagatttaattggtttcggcggtgagtttaccaatttacttgggcatgtacataaaagccaggtggatcttgatttacgtgttttgatcacccaaaaaggtaaaaaagtatggattaatcgagttgagcaggcgaagttgtctaaatacgtaggtcagctgaatgcgattttattttcaccggaagacctcgagttgatcaagggtgcaccagcactgcggcggagatttatggatcaagaatttggtcaaataaatgcagagtatttatacttcgcaagtaagtatcggcaagttttaattcaaaagaataattatctgaagcagctagctaaaggtaaggcaaaggatcaggtctttttagatgtactttcagatcaactagctggtatcgccgctgaagttgtctttcgacgatttaaatttcttaagtatcttagtcactatgctagcgatgcttatgcacatattagtttaggcagtgagcagctttcaattgcttatcatccatcagtggctgacatccaagctgatgacagtacagaagaaatttatcaaaagattttagcaagttatgcacgaaataaggcaagtgaaattcgcaaggggacaactacttctgggccgcaccgtgatgatattgaatttaaacttgatggtcaaaatgcacatctttatgcttcgcaagggcagcagcgttcaattgcacttagcgtcaagctggcggaaattcaattggtgcatcaactaacagatgagtatcctttactcttgctggatgatgtaatgagcgagttagatcatggtcgacaaagtgcgctacttaattatattcatgggaaaacgcaaacctttattactacgactgacttagaggggatttcctgggaaataattaaaaagccgcgtgtgtatcacattcaatcaggcaaaattagtttggagaaggagaattaaatggctgataattcaaaagaaaatcttgaaaaggtcaaaaaatatgaaaaagaggctgacaagtataatgccagtcaaattcaggttcttggcggtctagaagctgtacgtaagcggccaggtatgtatatcggttcgactagttctcagggattgcaccacttagtgtgggaaattattgataacagtattgatgaacgacttgctggttttgcgaccaagattgaagttacgactaacgaagatggtagtgtcaccgttcaagatgatggacgtgggattcctgtagatattcaagaaaaaacaggtcgtcctgcattagagactgtatttactgtacttcacgccggtggtaaattcggcggtggtggatataaggtttctggtggtttgcacggagttggggcttcagtagttaacgctctgtccactaaacttgatgttaccgtaatgcgtgatggcaaaaagtactttatcgatttcgatcatggccgtgttaaggatgagatgaaacaaattggcacggttccacttgatgaacatgggacgattgttcacttctatccagatccagatattttcacagaaactattgtttttgatgacaagatcttgaagaacagaatccgtgaattggcctttttgaacaagggattaactttaacctttactgacaagcgtaaagacactgccgaaacagatgtgtataagtttgaaggtgggattaaggaatacgttgcctttttgaacaagggacaagaagtattatttgatgatccaatttatgttgaaagcacctataatggcattgatgttgaagtggctttgcaatatacaaatggctataagactactttgatgacttttgccaataatattcacacctatgaaggtgggatgcacgaggccggttttaagactgcgttaacacgtgtggttaatgactatgcacataagtctaagatcttgaaagataaggacgataatctttccggtgaagacattcgtgaaggaatgacagctattgtctcagttaagcaccctagtccgcaatttgaaggtcagactaagaccaagttaggtaattcggatgctagaactgctgtagataaggctttttcagaaacctttagtcgtttcttgatggaaaatccttcagttgggcgcaagatcgtagaaaagggtcaattagccgaacgagctagaactgctgccaagcgtgcacgtgaagtaacaagaaagaaatctggtctggaaattgctaatttaccaggtaagttagccgacaatacaagtaacgatccaagtatttcagaactgtttatcgtcgagggtaactcagccggcggttctgctaagcaaggtagatcacgtttaacacaggctattttgccaatcagaggtaagattttaaatgttgaaaaagcttcgatggatcgaatcttggctaaccaagaaattagatctttattcacagctttaggaacaggctttggtgctgactttgacgtttcaaaagcacgttatcacaaattgattatcatgactgatgccgatgtcgatggtgcccacattagaaccttgctgttgaccttgttctataactatatgcgcccaatgatcgacaagggctatgtttatatcgccaagccacctctataccaagttcgtcaggggaaagtggtcagatatcttgatactgacgaagaattgcatgattacttaggtagcttgcaaccaagtcccaagcctactgtgcaacgttacaaggggttaggtgaaatggacccagagcagttgtgggaaactactatgaatccagaaaatagaagactggatcgggtaagtcctgagtatgctaaagatgctgacgcagtctttgagctcttaatgggaaatgaagtttcaccaagacgtgactttattcaaaagaatgctaaatatgttgaaaacttggatgcataggaggattagatggacgagaatcaaactcaagatcatagaattaaaaacgtcgatctaactagcatgatgcgtagttcatttttggattacgcaatgtcagttattgttgcacgtgctttacctgatgttcgtgatggcttaaagcccgtacaacgtcgtattctttacggtatgagcgagttgggggtaacgcctgataaaccatacaagaagagtgccagaattgttggggaagttatgggtaagtttcacccccatggtgattcctcaatctatcttgctatggcacacatggcacaagatttctcataccgttacatgttagtcgatggtcacggtaacttcggttctgtcgatggtgatgagccagccgcaatgcgttataccgaagcaagaatgagtaaaattgctgtggaaatgttgcgcgatatcaacaaaaacaccattgattggcaaagaaactatgatgataccgaaaatgaaccggttgtcttacctgctagaattcctaacttgcttgttaacggtgctaacgggattgccgttgggatgacaacaaatatcccgccacataacttgactgaagttattagtggtttgcacatgttaatgaaaaatcctgatgctacaaccaaggacttgatgaaagttatcccaggtcccgattttccaactggcggaattattatgggacgtggtggtatctaccgtgcttatgagagtggtaagggtaacattgttgttcgcgccaaaaccaatattgagactgaaaagagcggccgcgagcgcataattgtgagcgaaattccatttatggtaaacaaggctgaattggtgaagaaaattgctgatttggctcgagaaaagactatcgatggaattactggtgtgcgtgatgaatcagaccagacagggatgcggattaccattgatattcgccgtgatgctagtgctagcgttgttttgaataatttattcaagcaaactcaaatgcaggctaactttggtatgaatatggtggctattgttgatggtgcgccacactttttaaccttgaagcaaatgctgcaatattacttggatcaccaagaagatgttgtaactcgcagaacaagattcgagttagctaaggcagaggcaagagcccacatccttgaagggttaagaatcgctctggacaatattgatgaaattgtccacattatccgcaatagtcaatcaagtgacattgctaaagcaactttgattagccgctttggccttgatgataagcaatctcaggctatcttagacatgcgtttggttcgcttgactggcttggagcgcgataaggtagaagctgaatacaaggaattacaagctaaaattgctgactacaaagatattttgtctaagcctgagagaattgaccaaattatctatgacgaattgcttgatattcaaaaacgattcggtgataagcgaagaaccgaaattggtgctagcgaagtcgtttcaattgaagatgaagatttgattgaaaagcaaaatattctgttgacggttacccataacggctatattaagagaatgccaattcaggaatttaagactcaaaaccgtggtggtaaaggtatcaagggaatgggtgtacaagatggcgactttattgagcatttgatttactcaagtacgcacgatctgctcttgttctttactaatgctggtaaggtttactccaagaaagcctatgagattcctgaatacggccgcgcagctaaaggattgccagtagtcaacttattgcaattggaaaagggcgaaaaggtccaaactgtaattaatattccggaaggtgctgacgataattacttattctttgttactaagatgggaactgtaaagcgtacacacgttagcgaattttctaatattagaaacagtggtttaattgccttaactttgaaagatggcgatgaattaagcaatgttttgactactgatggtaagcaaaacatcttaatcgggactcacttgggctacgctgttaccttcaatgaaggcgatgttcgggcaatgggtcgaactgctgctggtgttcgcggaattaacttgcgtgagcatgactatgttgttggttcaggtattttaggtgctgatgaccaagtcttggtaatttctgaaaagggttatggtaaacggactccagcttcagaatatccagttaaaggccgtggcggtaaaggtattaagactgccaatattactgagaagaatggtccattagctggtgtaacaatcattaactcaaataatgatgtgatggtaattactactgacggaattatgattcggtttagaattgatgatgtttcgcaaactggccgtagcaccatgggtgttcgcttgattaaagttagcgatgatagtcaggttgcaagtttaaccgttgttccaactgaggaagaacaagatcaaactggtgacgatgacgactcaaaaaatggataattaattaaaaaaacaaaaaatttgaacttttaaaaaaattatcaaacttttttgcgtaataaataatgagcagtaaaaaatctgctaggatcacgtgaaaacagtttggtaattttttatttatatgctaaaattagaaattgcgagtaatattccattactccttgttcttgattttagcaagaaccatatagtccagaaggaggtgcaatagtcatggcaactacaaagtacgaagtaacttacatcatcaagccagatgttgacgaagacaacaagaaggcagttgtagaaaactacgacaaggttatcgctgataacggtggtactatggtagaatccaaagactggggcaagcgtcgtttcgcatatgaaattgataagtatcgtgaaggtacttaccacattatgactttcactgctgacaacgctgacgcagttaacgaatttagccgtttgtcaaagattgacaacgctatcttacgttcaatgaccgttaagttagataagtaattttaatttattatccgttatgtgatttaggaaaggaaggtacatgagtatgattaatagagttgtacttgttggccgtttaacacgtgatcctgaattacgtactactgggagtggaatctcggttgctacgtttactcttgctgttgaccgtcaatttacaaatagccaaggtgagagaggcgcagatttcgtcagctgtgtaatttggagaaagtcagcagaaaacttctgcaactttacttcaaagggttcattagttggaattgatggccgaattcaaaccagaagttatgataataaagatgggcaaagggtatatgtaaccgaagttgttgttgataacttcgcattgctcgaatcacgcaaggatcgtgaagcccgcggtcaaaatggtggttatacaccaaatagtggaaatgctggcagtcaacctgctaacaatttcccaaataatggcggatcacaaggtaattcacagactaataacaatcaaaataattcacaagatccatttagtggctcaggtgatacgattgatatttctgatgacgatctaccattttaaactaaattaaagaaaggattctagaacatggctcaacaaagaagaggcggccgtcgtcgtcgtaaggttgactacatcgcagctaaccacatcgactacgttgactacaaggatgtcgatctgttgaaacgttttatctcagaaagaggtaagattttaccacgtcgtgttactggcactagtgctaagaaccaacgtaaagtagctaatgcaattaagagagctcgtatcatgggcttgttaccattcgttgctgaagactaatttagatcgaaataaaccaaaaggacaggacacaaggttctgtccttttttcgtataataattaaaaaaattctctcttcgtattgtaccctaagtgtataattttttacggtaagttgaataaataattaaaaaagcccaagtcctttgaatttggacttgagctcaaacaaaaagaccagtagtctgatgttaagaacaaaaaacacattagaagctggtcttttatgaattcaattgtaactgaaatcgcaaatattataaagtctgaagataattatattaagcgtgaaagaaaaataatctgtttcttcttaaacctgattaaggaaatcatggccttggctttagctaaagttgatgatgaaatgattaccaaggttaaagcacagggatatcagattgataagaagaatgagcgctcaatcaatatggcttttggcgaagttaggtatgtcagaagaagatatgtctgcccaggcaaacaagcaaggtatcccttggatgaattaataggctttgacaaatacaagcgctacagtattttagcagtcaaaaacatcttagaagtaagcagcgttgccacttatcgcaatactgctctagcagtcaattgcctgtctggctttaatattagccatatgcaggtgggcaatttggtaaaaatggccgggaaaaatattaaagcgggccaagaagcagattcaagatatgatgccgcaggcactaagaaaaaggtcccagttttgtatcttgaaggcgatggcgtggtgatcaaaggcactaaaagccggttggaatttcatcgctatcaggtctgtgaaggcattgtcaatataagcaagaaacgcagaaagcgaatcaatgccaaggaatttgtttctttaagccgacttgatgcgctgaacgaagccaaggagtacctggccaatacttatgatctttctgatactgtaattcttagcaacgccgatggcggtgctggatatgtcaaaacagacttcgatgacattgtagggctatgcaagcgtcatgagcatttcttggatgtctttcacctaaataagaaaatcaaagaaaggctatattttgcgcctgacctgcaaggcaagctgatttctgctttggaatacaaatacagctatgaaaaaactatcctaaccactgcagaaagccgactaattgatgaattgaataccgagctcaatcatgattatctggggcgcctaaagaattatattgatcgtcattgggacgatattaagccgtttaagaaacgaaaactgactgtgactaaagccattggctgctgcgagagcaaccaccgcaagtatacctaccgtgttaaggggcaaggcaagaaatggtcaaaatctggagcagaaggcatgcttaggatcttaagctgcatcaagaatcgagagctggaattttggcttagcagcgagtttgaagattcagaaataactgtattgactgaacaggaattaaaagcagcggcccgtgacagcttaaagaagcgtcatgaagttcatttaggcatccagcatggcgcattaaccgcacaggtagctggcaatagttatttaagcaagctaagcagaaatttaagtcatataaatatttaagaaattaaggttagactaatggtttaaaggctaccgcaaaaacattgacacttactattgtacctactgttttcaatcatgagccggaataaggtataattaacactgatatactatatctattaggaaggatcttcatgaaggattttttacgtaagctagaattgcctgaatttattaaggattcacggctgacagcttctataatcattgcactttctctttcattattgggaagcattattgcgatgattatgaatccattgtttggtttggcaatgcttttagtctttattttgaccgttgcctttgccatctatgggacctatattttagcgggtaatgcaaatagctttgcggttaatttgtcttaccggataaagcgtagtgaacaagaagcaatgattaagatgccgttgggaattttgctttatgattcggatcaccaaattcagtgggttaatccatatctgcaattatatttaaagagtacagatttagtggggcacacaattgaatcagttgaccctgatctgaataagctacttaatgaagcaattgaggcaaaaacagcagaaaatcatctggttgattgggatggtcaccgatttgaaatggtggtccaaaataatttaggcgtaatatatttattggatattacgcgctatgccaaaattgaagataaatataaagctgaacgattggcgattggtcaaattttcatcgataattatgatgagctaagtgaagcaatgcatgatcaagaattgaccagcatgagttcatatgtgcaaaatacattgagtgattatgcgaaaaagtttaacgcatatttaaaacggattgatgaagaccatttcttgatcttgatccatatgcaagaattagctgagatggagaaggacaaattctctgttttagataaggtgcgtcaagaaacgagtagaaacaatacgccacttactttatctatgggaattgcttttgggagtgattctttgtctgaaattgccaaccaggctcaatctaacttggattttgccctaggtcgaggtggagaccaggttgtcttacgtcaacccggtaaagacgcccgcttttatggcggtaagtctaatccgatggaaaagcggactagagttagagcaagaatggtttcacaagcaattagtgaactatttaaagatgccgatcaagtttttgttgttggtcatcagcgtcctgacatggattcagtcggtagtgggattggcgtagtaaaattagctcgtcttcacggagttaaagctaattttgttttagatactaataagacaaactatgatgttggtcgcttggtcaccttaatgcaacagaaaaatcaggataaggatatttttattaaccctgatgtagctttagctcaagttactgacaagtcaatgttggtaatggttgatcattcgaagtattcaattacttactcacgggcactttatgatcgtttgaagaatcgaatcatcgttattgatcaccatagacgaggcgaggaattccctgaaaatccaatgttaacctatgttgaaccatatgcttcttcggcttgtgaattggtcactgaaatgattgaatatcagcagccagctaacggtaagcgagttttgaccgatattgaagctacagcaatgttagctgggattgtggtcgactccaaggaattctcgttgagaacaggaactagaaccttcgatgcggctagctacttacgttcaatcggggctgactcagcagttgtaagcatgctcttgaaagaggatattgatagtttcctcgaacggacgcatttagtagccactttgaagatggtgaagccacatatggccgtattatgtggacctgatgataagattatagatccgatcattacagcgcaggcggctgatactgcacttgatttgggaaatgtgggtgctagtttcgcaattacgcggcgcagtgataatacgattggtatttcagctagatcaatgggtaagatcaacgttcaaattattatggaaaaattgggcggtggtggacatctttctaatgcggcaacacagattaaagatgttactattgaagaagcaaaacaaaaattacttgatgcaattgatgaatatgaaaaagaaaatgattagggaggacaaatatgaaagttatttttactcaagatgttagaggtcgaggtaagcgtggacaagttaaggacgtacctgatggctacgcacaaaattacttgattaagcgaggcttggctaaagaagctactaaaggtaacatgaataccttgaagcgtgtagaagctaatgaaaaggctgcttatgaagcagaaaaggccgaagcagaaaagatcaaggcagaacttgaaaaagacgataccgttgttaacttcaaatctaaggctggtactgactcacgtttgtttggttcaatctcaagtaagaagattgtggaaggccttgaaaagcaatacggtatcaaggttgataaacgcaagcttaacttgccagaaccaattaagactttgggctatactaatgttcatgccaaattatttaagggtgttgaagctactattcgcgttcacgttactgaacaagactaataaaaagtggttgtgattgatggataatatcgtttctcaacaaattccgcatgatcgcgatgccgaaagggcagttctgggtgcgatttttatcgatcctgaagcaattgcggatgctagtgcggtagttcagcctgaagatttctatgagcgggctaatcaaattgtctttcaagcgatgttggacttgtctgatcgcggggatgcaattgatacgctgaccttacaggatgaattaaataaaagaaatcagttagaagatattggtggtatcggttatgtttctgaattagcgatggccacaccgacagcagcgcatgttacctattatgccaaaattgtgcataggaaggcgctgcttcgtcgtttaatctctgctagtcagaagattatctctaatgcaatcgatggctctgacgatgtaacagacattctagatgacgctgaaagtgaaattatgaatgtttcgtcagagaatagcacaggcggctttaggaccattaaagagatcgttaattcagcgattaatgatattaataatattccggatgacggaaatatggttactggcttgccgactggttttgcggaattagataagatgacaactggttttcacgatgatgaattgatcattgtagctgctcgtcctggtgtgggtaagacttcatttgccttaaatattgcgcaaaatgtagggctacacactgaaaaaagtgtagctatgttctcactagaaatgagtggagagcaactggttcagaggatgttagcttctgaaggactgattaattcacagcacttgagaactggccagcttgatgaagaagaatggcgtaaattggtagtggcttctgggtcactagcaggtgcgcaaatctttatcgatgatacgcccggaatcaagatgagtgaaattcgtgctaaatcacggcgattagctaaggaaaagggcaatcttggtcttattgtaattgactacttgcagttgattgagggaccacgtagtgagtcacggcaacaagaagtttcagctatttcacgacaattaaaaaagctagctaaggagcttcatgtgcccgtcattgccctttcgcagctatcacggtcagttgagcagagacaggataaacggcctgtactgtccgatattcgtgaatctggatcaattgaacaagatgccgacattgtttctttcttatatcgggatgattattatcgcgatgagcctaaagatggcgaaagtagtggcagtcaagatgaagttggcgcagaagacgataacggtgaagtagaagtcattattgaaaagaaccgttctggtagtcgggggacagttaaattaatgttctctaagccgtttaaccggttttcaaatttggattatgcacatgatcctaatggcaattaagattaatcaagtgtctgggaaaaaactaagtctcagatcatgaaaaaagaacgttgaatttttgtttcaacgctctttttgtatacttttagctccagccttgatattattaaatcatcacaaaataaaaacaaaaaggtggaaactaacatgtacaagaattatatcacaggtcaaactgctttaacacttaatctagattttgccattccggccaatcatttggctaatgtcatcagctggtttgtagattcaattccagaagatgttttagtaggcaagactgctaaaacgggccgcccagcctatcatccagccatgatgctcaaaatactgctttttgcttactccagaagagttttttctggcagaaagattgagttgatgctggaagaaaatctgccaatgatgatcttggctgaccagcaaaagatttcatatcatactatcaataattttagatcaagcagccatgccaatgaactgattaaaaagagctttatctacttcactaacctgttagaagatgaaggcttaatcaatgaaggtgctgcttttatcgatggtactaagattgaagctgatgctaaccgctatacatttgtctggcgcaaagcggttgaaaagtatcatgaaaagctgaaaggccaggcagttgaactttatgatgaattgattactaaagaagtagtcaaagaaatggaaaaagaaaaagttcaaactagtcaggggctaaaggaattagctcaagaaactgaagcagaaattaacaagctgactaaagagattgagcaggaaaacaaagccattcctggcggttcacctcgaaaagccaagcgacgtggactaaaaaagattctgcaccggctaagaaaagattatgtgccaagaatgcaaaaatatgaagaagccgaagagatctttgccggacgcaacagttattccaaaacagatcatgacgccacctttatgcatatgaaggaagaccacatgaaaaatggtcaattaaagcctggctacaatattcaagcagtcacgaccgatcaatatgtagttgattatgccatctttcctaatccgacagatttcaaaactttggagccggttttggatcaaatgaccgtgttggacaagtttgacaaaatcgtcgccgatgctggctatggcagtgaatacaattattcgatgctggaggaaaaatatccagacaagaagtactttattccctacactatgtatgaaaaagaacagaccaaaaagtataagaatgatccaactaagctaatcaactggtactacaatgaaaaagatgattattacattgatcatcatggcgtcagattcaatttcaaatattacagccagcgcaaggatcgttctactggtcaggtccgtgattttaaggtttatgaggcagacgagttccagctaacgccagaattggaacaattggctaaaacagttagcggccgccagcgccaagttcgctataatcctaactggcaatatttaaaagaaaaagcaaaagaagttctccaaagcgaagaaggcagacacatctatggcatgagaaaatatgatgtagagccagttttcggacatttgaagaacgtatttggcatgcgcagaacgcacctgcgaggtaaagagaaggtcgaaaccgatatcggaattgcctttatgatgatgaatttgaacaaatattgtcaaagaaggtggctgaagggccgatttttattgttaaaaattttaaagagaacaaaaaaacgatcaagattcttaaaaaaggaaatcttgatcgtttttattcatctggaagctagttttttcccagacacttttttgtacttaaataaaacacaaacaatatttgcatagtattgtactataatttatattttatattgaaagtacacttaatatttgttataactaatattgaaaagatcaaattacgaatatactactcatggaggaatagcgagtttatgaagtttaagaaaattttgcttggtgcgtgtgcagttttagcagtcgtttcactagctgcctgctcaaatagtaagaagagttcatcctcatcgaatgaacctaaggaattgaacgttgaatttgtaccaagtacccaagcaaataagatggaagctaaggccaagcctttaggcacattattgcaaaagcaattacacattccagttcacgtaaccgtttctaccgactatagtgggctggttgaagcaatgtcatctaagaaagttgacgtaggctttatgccaccatattcttacatattagctcataaaaagggaattgctgatgttttattgcaagccgaacgttacggctatgatgaaccatccggtaagatgaatcataccttaatgcataagtatcgtggtatgatcgtggttaagaagggctcaaagatcaaatcttggaaagacttaaagggtaaaaagattgcgattggcgatcctagttcttcatcgggctatgtttatccagttgcggaactttacaaaaagggtttgaatgtaaccaaggactgcaaattagttaatgttaagggtgacgatcaagaagtgttatccgttttgaatggggatgttgatgccgcattcgtcttctcagatgcacgtaatattgccgctaaggatgacaagaaagcaatgaccgatgttgtgccaatctactttaccaagtggattccaaacgatactattgcggttagaaaagatatgcctaaaaaattcagagttaaattagctaaggctttcaagaatattgctaagtctaagaagggtaagcaaattatcgaaagcatttataaccattatggttacgttgaagctaaggattccgactttgatggcttacgtcaataccaaaagattgtgaacaaggctaccggtggtaataattaagattaaaaaagcactcactaagtgctttttttgtattcatgctaagatcagttaaaataaataaaacactaaaagcaaaaatgaaaagagaagaaaaaatatgaaaattgctgttttaactgatagctcagcttatttaactaaagaacaacaagaaaaatatcaaatcgatgttttgccaattccaattatttggggcaaaaaagtatatcatgacttagtcgatattggttatgaagaattttatcaaaaactaaatacagcaaaagagctgccaactacttcgcagccttcaatcggtgatcttaagcagaagattgatgaatacgtggcagcaggctacacggatgttattgtaattactctttcaagtgggatttctagctatttctcaaccgttcagagtgttgcggcagaagaagaccgaatcaaggttcatccattcgatagtaaaattacctgtgctggtgaggcggattatgctatgttggcaggccgtttaatcgaggctggagcggatattgatttgatcatgcatgatcttaaggacctgcaaaaaacgatggatgtgcgctttatggtggacgatttgagccatttgaagcgtacaggtcgtttgtctaatgcggcaagttttgttgggacgctgtttaagattaagccgattttatcgatggatgtgcaaaatgaaggccatatttcagcgattgcgaaagagcgtcaatataaacgtgcatacaagcatgtgcaaaatgattttgataatttgactaaaaatatgccgtataagattcaggacacaatttttgattcacttgatcctgagaaaaaacaggcctggcttgatgattaccgagctaagttccctaagtataagtttgatactagtattatcggccctgttgttggggtgcatgtaggtcaaggtacaatgtcgatgatctggtgccgtgatttggatacttattttgatgaaaatggtcagccaatcaagggaattgagtcacaagcagtagtggatccagagtaagcataataccgatatggcaaaaaaatgagaggcactattgattctttaatatcattgctatattattattaataatttaatatggcgatgaatagggatgatcagagtgtcaatcagttctttttttaaaaagttaatagccaaaaataaactcttgtttttagctatggtgattactagtgcttttgcttctttagatggcgtcatttctccttatgttattgggaaaattactaatacactttctcagaaacattttagtgagataccgaaaatcttgttactgtatctgttgatgatgctttttctgaatgttagcttttatctatggcaattttgttggggaaaaattaccaaatcaagtaatgaattattgagatctacagcttttaataattttattgcttcccctagtgaaaagaaaatcactaataccctgaattttatcaatgttaatgttaaacaaattgaaaatcaatgtattgattcaacaattatgcttgtttactgcgttgagcaagccatcgtttcattagtttatattttaagtattaatggcattgcagcaatggttttcttagtttgtgggttaattccatcagttattccacgtttaactcgtaattgggttcagacaggaactaaaaagtggaatagcagttatgaaaactataatcaaaaaacaagtgatgctgtgtatggttttgatactatcagacatgcaaatggtgataatagattcaaaatatttgtccaaaaagcattaatgggagaagaaaagaagtattttttgatgaattttcggcgtaatacttctaattttttagcccaggtctcttattcattatcaatggttatttctttggctgttggtacattctttgtaattaatggtcaaattctagtaggtggtttgatttctctatttttagcatcagatcgtttaactagtccaattatttcgattgttaatattgcaaatcaattgacctctgttagtcctctgctaaaaaataaagctttacaaaaatctaaaaagcaagaatttaataatttagacttcaccaaattaccaaaccaagagaaaataatttttgatcactgcaatttagggtattctaataaagctattttgaagaatattaatttgacagtttctaaaggcaataaagtattgatcatcggtcgttctggtattggtaaatccactctgttcaagacattgcttaatgaaattccattgctaaagggcaaaatactggtagataatagtcttaaccaagctaatttctataccaattttggtattgttagtcaggatacttatatattcgctgaatctttgcgctttaatttaacgcttggaaaagattttcctactcagcaagtaataaatgttttgaaaactgttaaattaagttatttagctaatgaaaaaagcttagacatgcagatcggggagaagggattatcactttcgggtggagaaaaacgaaaactggaaattgcacgagctttattgaatcaaaaatcgattttacttgttgacgaaggactatctggacttgatgaagaaagcaataaacaaatttttgcacttcttcaaagtcttccgcagacagtaattgaaattgaacatgctgttagtccagaagagaaaaatcaatttgatcaaattattgatctaggagctcagtattgatttttttataaataaacaaaaacaattacatacgtatgaaagcctttacacataaagacttttttatttataatattagcagcacgaaaactttttggagaaaaacttacatacagaaaaggatgagaatatggcagaaaagaaatatgtcggcagtatcgaagcaggcggtactaaatttatcgtagctgtgcaagatgttgaaacaggtaaggaagtagcgcgtgatcgtattcctaccactactaacaaggagactttacaaaagactgctgaatttttcaaaaagcaccccgttgatgcattaggaattggtacttttggtccaattgatatcaatcctaactctcggacttatggttacattttggacacgcctaagccaggttggtcaggtacagatgtgaagggcttctttgaaagaaaattaggtattccagttgccatgacgactgacgttaacgcatcatgttatggtgaatatgttgctcgcggtcgcgatgattctaagagctacttctatgcaacagttggtactggcgttggagctggaattgtgcaagcgggtaagttgctcggtttgaataaccacccagaaatggggcacatgttggttcgtcgttatcctggtgatgattatgaaggccattgcccattccataatgatgcttgtgttgaaggcatgtctgctggtccaagtcttgagggcagaactggtatccctggtgaaaaattgtctcgcgataacaaggtcttcacttattctgcgtattacattgctcaaatgctcttcaatgtttacatggctgctcgtccagatgtaatgattgttggcggttcagttttaaatgaagatgatttggttaaggtaagaaagttctttgatgaatttaacaacaattacgttgccacacccgatttgaatgaattaattgtgcgtcctgctgtggctcacaacgggtctgcaactcttggcgattttgaattagctaagaatttgctcaaataaaaaagcatagataaattgaataagcaataaaaaggctcaactcgttaagaaagacgtaaggcgagccttttttgacgtaatttgacctaaatgcgcgtaatattaattctagaaacgtaaccggtttattaagaaaggagcccaactatgaacaaatcagatagtggcttaaaagacaaagttatcggtaaagtgaaagaagtcgaaggtaaaattaccggcgataaatcacgcgaagtccaaggaaaagctcaacaagccaagggcaaagttaaggacaaagccaaaaaattaaaggatgatctggaaaaagaccatcaaatagatgaagattgttaaagactcaggtcgactagcaatagctaaacagaaagcaaataggtgatcctatgttatcatggatctgggttttaatcgttggcgctataataggtctaatagctggtttcataaccggcaagggtggatcaatgggatttctagctaatttaatagcagggctggttggttcaaccttaggccaagcaatctttggttcgtgggggccgcaaatggctgggatggcaatcgtaccatcaatattgggagccgtcatcttggtactagtggtttcctttgtactagggatgcttagaaaaactgaataaaaatagaataagagaagtgtctgggaaaaaactaacccttagatactgaaagacgatcaatccaactcttaatttgagttgcttgaccgtctttttctgtctatttttatttttgaacaaagaaaattggtcttttgaccatcttctgttccaatatttgcttaaattcatcatcatgaaggctattcctatatctgtttcaaccttctttttgcctcttaaatgagttcggcgcatgccaaagacgttcttcaaatgtccaaaaatcggctccacatcatatttcctcatgctgtagatgtgtctgccttcaggactttggagaactgctttggctttttcttttaggtattgccagttaggattatagcgaacctgacgttggcgtccgctcttagtcttggctaagcgttctaattctggcgttagttgaaattcatctgcttcatagaccttaaaatcacgaacctgaccagtcgatcgatctttacgttgactataatatttgaagttgaatctgacgccattttgatcaaggtaataatcatctttttcatcatagaaccagttagccagcttagtcggatcgttgcgatgctttctggtcttttccttttcgtacatggtataaggaatatagtacttcttgtctgaatactcttcttctaacattgaataattatattcgctgccataaccagcatcagcgacaatcttgtcaaacttgtctagtgtcgtcatctgctttaaaaatggttcgaaagttctgaaatcagttggattagggtataaagcaaagtcaaccacatattgatcagtggtggcagcttgaatattgtagcctggcttgagctggccgttcttcatgtgatcttccttcatatgcatgaaagtcgcgtcatgatctgtcttagaatagctgttacgccctgcaaagatttctttcgcctcttcatatttcttcattcgaggaacatagtcttttcttagtttatgaagcagctttttaagaccgcgtcttcttgcttttctaggcgaaccgccagggattgctttgggttcttgctcaatttcttcggtcagcttttcaatctcggcttccgtttcttgtgctagctctgccaaaccttgactggtctggactttctcttttgccattgctttgacgacttctttggcaatcaattcatcataaagctcaaccgcttgacctttgagcttgtcatgaaatttttcaactgccttgcgccaaacaaaagtatagcgattggcgtcagcttcgattttagtgccatcaataaagatcgctccttcattgataaggccctcggcttctaacaaattggtaaagtagaggaagcttttcttaaccagctcattggcatgcttgctggatctaaagttattgatagtatggtaagaaatctgttggtgttcagccaaagccatcatcggcacgttttcttccagcattaattcgatttttctgcctgaaaatactcttctggaataagcaaaaagcaagattttaagcatcatcgctggatgataagctggacgaccggttttagcagtattacccaataagacatcttctggaattgaatcgacaaaccagctaatggtattagccaaatgattatgaggaatagcgaagtctaagttgagtgttaaagctgtttgacctatggtataattttgatacattaagattgccttctttctttttgttttgtggtgattcaataatatcaaggaaggcacttaaagtatagaaaaagaacgatgaaatccattaggaaatcatcgttcttttttcctgtctgagaattagttttttcccagacactttgtgtttcatgtgaaactattttagcttttttcgttcattttctttctcagctaaaaaacgttgcttaatttcttcaggcaaaagactagggaccgtcttgtcataaaattcaaagaatatgggtgccttgttagagtcattgctcttgggatataaggcaaagtcactttcgctaaacggtaagctgatattaccacgtaaagcattgataatctcaccgaacatatgcaaaacataacggcgcgtctcaggctctaatgacatgattacgcgactgaaacggacagtgcctaataatttatgggcagtaatttgaaaaatatcggtaatatttaattcatcaaatgcttggaaaagagcatcccataattcaccacgttgcttttcagggatgctgtggttaaagtcgatgaagaaatgccgcaaagaacgtgcacctgaagtaagtccttctgctagaacaaaactatcacggccaacagaccaacggcgtggatcatgttgctggaccatcggtgcagtgcttttgacgattaaaacgtgttcaggatgatcaagcatggtgccaatgattgaagcttctgggaggtaggtcttcatcttgggtaatgcacgtacaaagccaggtgctttccagacttggtggaaaaagccggggccgtcaaagctaaaggccttgataatacggtcctgcaaatcaggctcagcgacacttaaagcatattcagcgtaattgccacctttagagtgacctgctaaatatattttgtcgtgaggaaattccgcagcaatttcttttaaataatgagcagcaacatcttgcccatagactttaggcatgtagttcatgttcatatcttcgttccagccaattaatgaactgtcagtgccacgatagacaataataattttattgtcagttagtcgaaaagtagcagcggtgaattgcaaaggatatgggtctttttctaggcgattagtccagttaagaatcttaactttgcccaagcgaggtgatttgggcaaaagcagaacttgatcaccagctaaatctttcatttgtacctgaaatgaaggtagtactcgcagtttttcagctacttcgcttagggtgtgtcctttggcagatttgtcgacgggcagataaataatggaggcgaagagagacatccacactattgaaaggacgctctttaaaagaaagatctccacgccaacgtaaatattcaagtgttccggccataatctcgtcctttctttcacttttagcaataatactattctactagattattgtggcaaaataaaaaatctcaggcgaatgcttgagatctaaacagaattttaaataccaccacgcgtatagctgatgcgcgtaatatctggatacttacgtaagttcatgataattgaattttcgtcaagtttattattgataaccccatcaatgtagaaaactatccgatcatcacttacgtctaaaattttgatagtaatattttcaactttattttctgcaagttcatgtttaattttagacaaaatgtggtgctggttaatagccacaatttgaatgttaaaacgaacatgtggcgttattttgttgataatgacatcatcgtgaaagatcatttgaatgataaacaatagggcggttgataggataccgatgaaatacatgccagcaccaacagccatcccaatggcggcagttgcccaaactccagcggcagtagttaagcctgagacctgttcttttctaactaggattgtacccgcaccaatgaaggaaattcctgtaacgatctgggccgcaattcttgatggatctagtgcaatgtcatgcatgcttaatagatcggtaaatccatatttagatacgatcatgaataaagcagaagcaatcgcaactacgatatgagttctcacacccgcgctttttctctgaatcgcccgctcatagccgattaatgcgccacaaaaagctgcgacaacaattctaagtagccaatctaattcggttgtaattggagctaaagtttgcattatttagtcctcatcctttgtataatcaacaattattatcatttctattttaacgtaaatgcagaaaaattatagtctggggaatttttttgaacttttttcaaaaaagacttgcacagctctcgtctatgtggtttaattaatactgttgtcgggtgagacaacgaagagttgctgacttagctcagttggcagagcacctcactagtaatgaggaggtcggaggttcgaaccctctagtcagcattagttaaacaatttaatagtttttaagtctatcaattaagttcgaaagagcttgatatgataggcttttttgttgtttctagatatttgtgtagatttaaaaatagttatgaatatttagtttcaccacaaaaattgccacacagtttttctagtgtggcatctgtgtggcaaaggttcgattaatgttgtagtggcgggctttattgcttgccatttttttcgttttcaaagtatccatgatttaagaatgactgtcgatactcttttaagatttttatttgatggtctatggcaggaactaacgtatatgcattatttttattgtagaattcatccattaatttagtattcgattccttgtagtccttaatgaaattactatcattttgattcataataatttcttctaactgcatacgaataactaaattaacattattaatcatttcaagatcattggcaccttccaatgattcttcaaattttttatcaaataaaaatttgaatttatctttccaaaaatttattacgtatgatttctttttataatcttcatcatttttagtaaaagaatcagcggtatctttatctccatttatagaaagaaagtgagaaatattatttttcatattactcaattcttcattattatcataatatgctgaaaaaagtaaattaattaacttactctctacttcttcacctctaattccttcgccttttacataagatactggaactttaaatatttctgctaaagctttccatacctcttcatttggaattctgcttcctgcttcgtatcttgctattgttactcgtgtagctgatatgtttttgttctttaaaagattagatagatcttgttgtgtaaaataatttttttctcttagttctttaattcgatttggagtcatattattacctcactaagattaattttatacgattggtacataattagcaaaagtaccaattttggatacaaaagtgttgactacaagaatgaataattgtatattatatgtaaccaaatgtggtacacaaaattataaataaccatttttggaaacaaaaaagaaagagggaatattaaaaatgtccagtaatgtaacaaagcaaggtgaagtactatctaccttcaacgaaagtagtagtaaaagaaccccaattcaatcagcattaacaagaccgttggttgaagcaattggtaagtgttttctattgttgagcggaaccacagaagaagttcaagatcctaatgatgagtctaaaactattccgcgcgcagtatacgaagtaagagttattagctctaaaactagattacctattggaactgtgctaacggtgaaaattaaaggaggtaagagtgtaattactgatgaagagaataagaagttactgttaggcttagagaaaaataaggtagtagcattcgacgatctaagtcattggaactttaacggaaatgagggattatcagcttcaggtatgcgagtattagaagtcagtccgcaagaggctatgaatttatagaaatgaggcggcttatatgaaaataaaaaaattagtcttagataccaaaaacccgttaggcaatcctaacggggtaaaaatggcattaggagtaactttattatcttcaattggtcttgagtataaagttgcacctcaattcataaatgctggtaattataccgcattagcttatccatttttaattaatattatacctctagggtatccatgctggaaatgggttaatctccatatcgttaattataagatctataagcaattgatgaatattgttcattcggaacaattaatagactatggagataaaaaagaaactaccactttcggtgaaagaaaagttgaatatggtgtcaagatcgtctatgaagaaacggcagaaggtacatatattactgtatatcctaatggtataaaacatagcgacgccactcagacgctaaacaataggctagaggaaactttcaacatgaatgttttatcggtagatcatcagctagcttatacgaaatatttattgagaaatgtaaacagacaaagaatggaggtttctaatgataacttctaatttcgtaataaatcttgataagaatacatcattcagttttaaaggtagtggtgggattcttgtcactgggagaagtggctcaggcaagactaataccaccacatatataatgctgaaggcgatgtcccaatgtgattgcggtttatatattattgatgcaaaaagagctgatatgtatggacttcatcaatttttaaaagatggcaagaaggtagtggcaagtacaacaaatcaaatagcacgattgttgcgtgttcttaatgagaacatgagcgcacggtatgagcattttaagaatggaaaatggggacaggatttcgctgaatatggatatagaccatatttattagtcattgatgaagtatctgcgatgttggctggggctggtaagaataagaaagaaataatgggtgaattgcgtcaagttatccttcgtggacgacaagcagggatatttacccttatttcagggcagagaattgatgcaactattttagatcgtgatattaccttacagttaggtacaagaatcgtgatgggacaagcagattcggagacttatcgcatggcttacccaatggtaaatgatattaaagcattaccattagtacctaataagccggggtatggtcttatctattcagatgggcaaaaaattagcaatcctactccatttgtctcaccggatatgtctaacattgatgttccaggggtaattacgaggttagagaataattttgatccatctaaatatattgatgaatcaagctattgggaggtttagtaattgataagttgccagctggcgggcgacagagtcgcacgaatggaatgtccaagcgtgagcgggctggcaacacccaactaataatatgggtgtaacggaaagattattaatcatggaaacgatgaataatattaaaattgatcaacttcgtctaaatattccatatgatgaaatctatcaagtagaaaatagtcaaagtttacccaaagaagttatagtagctgataatctgctgcatctggcatggttgtttaagtctaatacagtgagtcatggacataatggctatacttcttcatataatttcggttcaggagaacaaggcggaaatatttccgtaatgtggaacgagtcaagaaaagatatgggaatactagtcgactttactgcgacaggcaaagcgctatatgaaagccttgctgaattacatggaattcctgttaattggaagaaaataattgaagaattatatgaaaaaatggggcatatatcgaggctagatatagctactgaccttattaattatggtttttcagttaacgaaattattcaaaggttaaagaatgaagaatcatttttcttgaatactcaaggaaataaaatcaatgctaatcgatttaagataattggaagctatagtgaagctcagactctatatatcggtagtagaaaaagtgatgcttttctgagaatttatgataaaaaagttgaacaggatcgagccgatggactctatagaaacttggctagaaactgtaacgattggataagagtagaagcagaatttaaacaccgtttagctaaagaactaggaaaatatattacaacattaactgcagataatatttatccttatttacttggctgtgtactagaacgttggtcattagttgatagggaagaataatgacatatgaaaaattccaatattctaaagaatggaagattttaaaagagttatcgaaaggacaaggacttcaagaactaaaacaagctcaagttgacgcttccctgaatagaaaaattaattggttcttgtatggtggtgccagtggagttattacgttgattaaagaaatttatggtgatgaagcactaaaaaagttttatcaatttttagattattttatttctaatcctgatacgttaggacattactaccactcggacaagataaaggcggatactaaaactattgcagattctacgcaaggcttgaactttggagaatatttagaagacttaaagagagaattagttgagggagataaacagaaaggcaggggctaatatgtttggcacagagttactcaacgctagacaaatagcagaagaattaggtattagctatacttacttttttaaattaattaaaaatgggtgtccttatcatcaacttggagaccaaggacgtaaatattacgttttaaaggaagtacaagagtggctattagtaagtagccaacattaattagaagacgtagcaacttgctacgcttttttaggagaaagctatgtcaattacacaaattaaaacggggaaaaataaaggaaaataccgtgttagaattcaacctactgataatgaaacaggtaaaactattccgattcctagtaaagtaacaaaaactagcagtaagcgtgaagcaaaacaattagaagaacaaatgtgggtgcaatatcgcgcgcataaagaaatgaatttaaatgtattagatcaaccacttgcaaaagctttagatcactatgtagaagaagaaagaagttcggggcgttggtcatcgattactacgtatgataattggaaatatacggttaagcttgtttctcaatatttcggaaagaaaaaagttaaagatatcaaagaaaaagatatgcgtagttttgctagaaattacataagtacacataaagcaactgtggcacctcattcaacgctagatagacagttacaaaatttaaggagttattttgctactttgaaggaatatggtgtcttaaagaatcctattcctatgaagccattaactaagttttttagacgtgatgaaatgaatgcccctgttaagaaatatgttttcactaataatgaaattaatgttcttaaagatagaatttatagagagcttggagtaacaagaataagttattggacaactagaattgctatcttgatagctctagatactggaatgagacctcaagaaattcaggctttaaagtggagtcaaattactaatgatggaagttttaaagtttttagaataaatgactcatggaatgaaaaagagaagcatcttaacggacatttgaaaagtcgaccgcatggagaatctagactaacccttcccctttctgaaccacttttgcagttattgaataagtttcgtcattgtcagttagaacttttaaaggagaatggtttaactaattttaatgatcgaattttattgaacatcacagattatcacttgtgcgcattagggtatccaataactcaaaaaagtatgaatgatatgttgaaacagttgagtaagaaagtaggggttaataatcaaaatttaaatataagtatgtatacttgtcgtcatactgtagcaacaaaattagggaatacaccaggcatgtcttacccttgggcggcaagcagattagggcattctttaaagatgtttatgcggacatatgtacatgttgatgaagatcgaaatgaagaaatgcttagattgatagctaaaagataaaagaaaaatgcaaaaataacttatatttgataaaaaaatgaattaatgtagtaatagcaagaatttgaaaataataaataacaaataatttttaacattttatagattttgaaaaaaaaagagcgtatactcagggcatcataaagagatgtgaaggagaaatcaaaatggttattgtagaacaaaagtttaataaatataatcatacaagcaacatggatgctatggagtacgctgcaggatgttgcacatgtacaacaacaagttgtacaacttcatgtgccgctgtagctgaaagttaatggatagttggcgctgtaaattatattacagtgctttttttaggagtataaatactgttatgtgtctattaagaataaaagacttaaaagttaattttaaggatcaaacagtactggattttagaggtcatgatatagagataaagtcaggagacaaagtagctctaattggaaaaaatggggcaggaaaaagtacactattaaattgtcttttacatgaagtaaaatacactggctgtataaaggagaagtatcatcagtcggatataggagtagtttttcaagaaaatgtatattttaaattcttgaaagtttatgaaatctttgaattagtgtggaataaacctaaaaagttaattttaaaatctaaatttattaagaattttaatttagcaagcattatgaataaatacatttctgacttatctggtggtgaaaaacagagattaacaatagctttggttttttctcaaaataaaaagatttacttactagatgaaataaattccggcttagattatgataacaggcatgaattaagtaaaatcataaataatattactgaagaaaaaacagtaatacaaataagtcattattttgaagaagttgaaaattgggctaataaattgataatccttgatagaggcaagatgatatattttggaagcttatctaagttttattctataaataagcatgattcattaattattataaatgataaaaaaagcctatctagactgacccaatgtcattaagttaagctattgacattggagaaaaaaacaattaaagcatcatttggctttagatagccaatttgatgcttttttgcgtatgctaaataagcgtagtttgtatttcttttttaattaggccacgcgatacatgtaatatactgcagacttggcttttaaatttcgtttgtcttttcgcctttatttttgcaaaaaaaagaatcgaatccaaatgattcgattcctaaaaagatcagttttcaaaagtcaatagcttaacttaatgacattgagactgacccagaagcctttaaatctttatagtaataaatatattgtatctagtagtattgatgagagacatgatataacaaatttattagagcaacaaaagatagattataaagtggtgccacaaaatttatacacaacttataaattagcattagtaaaacatgaggataggtaaaataatggctagagaaattttattaagtttaaaagcacaacttagagttccaattgctgtatttttttctattttttttccaattattatgatgattatgatgatgacatcttacggtaatttttcattaagaaatggatatcactttatagataagtacgcgtggtgctagttaaatctttctagacaataagccaaattataagctaaaattgcaatttccaaccggctttgaaagcctatcagactacgtgctcgattgttctcggcattgtaataggtcagaagcgaaaagtcgctttcaattgttctgcgaatagccatcaattgatgatcattgtgctttttagctcctgtcatatttttacgatatggtgtccaaagttcataacccatttgttttagctgttgatgcagttctttgcctaaatagccttcgtcgccaagaagatagtaattagatggatgggcattttccagcagttcaactgtctccttggcatcatgaactgatgcttttgttacgacataatcaagaatgtaaccgtcatcgctaacaatggcatgaactttgaaaccatagaagtaaattttcttggtggccttataaccaatgttggcataaccgcgaaaaattttagcacgatagttgcgaattggttggcaaacaggtaccggaaagctgtcaatgatcaagaaatgtccattcaggtcaacctttttattcatttcttgccgtatctgataaatcaattgcaatagctgacgtgaacgccgattaaaacgtgagtgtgataaacaattgaaacattcacagaatcttctttgtgattcaattcctgtcttagcttgccagataagtaaagccaaaatcagactgtccgtagttttaatttgatcaatatttcgccgatgagtaaactcagccggtgcatacaaacgataccagtgccgacaaattatcactaaatctttaaaactaacttgtaaatggtggctaaaacgcttaagcttaagacagttcaatcagatcagactcttttctattattactatttacaagtcgagtctaacaagattggacttttttattaactaaaacgatttaactagcaccatgcgtagataagtatttttttattagtactactataggtattctacctctaaccttaattagttttcctattgatataaataatttgcttgaaactaagcattacttacgtttgaaatacttaaatgttgatttaaaaaaattatttttatcaaatattatttcttatttgataattgtatttatttcagttggaataaatttaatagtaggaaaaagtatatataatttaagattacctagtatagagtatttatgttatttttttattcaattattctattgtgcgatagttctacttatatttggcttactgttaagtttaatagtatcagatatcaaagctttaatgcctgtaggaatgactataatgtttatattatttatggttataggtgtttttgtacagtatagctccttaccgaaaattatacgtactatttctagctacataccagtaaaatatttggcaaatgatttctattatatctggattggtcaggctaaatggaatatgccattttttaaatgtaatacgatctggcttatttttctgtgtttgatttgttacataatttatagaaggaagaataatgttacgaagattttcaactagtaaggatttaagaattgggatagagataatagttggaatcactttatcatttatcattaattttataatgatttcaattgggtatgccattacaaatagtgaaaaattaaaagaatattcggtcaattattttggattagtcatatataaaataaagaattatggaaataaaggtataccagtttccaataatatgatgtttatcggaatagttttaacaataatatttgtttttattgtagagtgggttgtatataagagggataagaatggtagagtatgagcttaagaaactgtcaaatcttttgtgtaaatagttctttctcgtaaattgattttttaattatttatttaatcaaagtaggattctaaggtgtcctgaacctgaccaaagcctttatgaattcgattgaaataacggtcattgtagctcattgcctgaatgccaataaaagcatcaagcgactgttcagttggaaactctgccttaggcttagctttacgcttgatgacgttgttaaaggattcaatcatattggttgaataaattgaagctctgatttgtttgggataattgtagaagaccagcagatcgggctcaatttccttcaaacctttgatgacattgctataagctttattccatctggcatagaatttgtgcaagacagctgcagcttcttttttgcttgtctgttgatgtatctgcttgaattcgttcatgatcttttcgcggtcatccacccggactttagcacagatattgcgcatgacatgaaccaggcagcgttgaaaatgagctttaggataagtcctggccaaggctgttttcatgccaacaacaccatcagaaagaaagagttcaacttgcttcaagcctctggacttcatgttttgaagcatctctgtccagacttcaatgttctcactaggagcaatgcagtagtcaatgacttccttatgtccattaggtttaatgccaatggcaatatatactgcttcacgctcaaacgtttctcggcgcaaaggaaggtatgtcgcatccaaatagacgcagaaaaacttgtcgcttagcttgcgtttgtggtaagcctcaaccttggggagcatctgcttggaaatatttgatacttgagctggactataatgactgccatacattttctcaatcaagtcagcgatttctctggtggttacgcctttggagtagagcttgataatcgtgctttccaaaacatcagagtgctgcttgtagtcaggcagcgtgtgctgatgaaactgaccgttgcggtctcgaggcacttgcacttcaattggtccaaactgggtatcaaccttgcggaaataagcaccatttctagaattgccagtattccagccatttctggcatagggatcatagcctagaaaggcagtcaattcagcttctagcaagttattaacagcctgttgtagctctttgcgcaataaatcatttattttgtctggattgaatagagcttgagcaaaatctttggtaaaatcattcatgaaggagttcttctttctgtatgtgttttttttgttcaaaccaatcatacgagaaaggaactcctttttctaatgtttaaagaaataaatttaaggaatcattcatccttacacaaaatattttacagtctcgagcttaaaggattatttaatcaaaatacgctttcaacatcagatattagtaataataataattacaataatcaacaattatttgatcatattataagaggaaatgctaattctgagatgctgacatacttacttaatatgaaccatcagcgattgaatgattttaagagtatgcatcaatataattatggaaattttgcatccttaatgaacagtgtagaacagtataacgaaatagaaaatgatgaaactattttgctacctaagccattgagaataaaaaataagttacagcaggttctaaagaaaagaaaaagtgttagaaattatataggcttatcatgtgatttacgagaattgtccacaatattgatgtattcatttggaatctcgggaagaaaagagaattttggtggaatagtcgcaagtatgcgatattacgcttctggaggtgctctatatccaatttcagtgattatatatataaataaggtggatggattgaaaaaggggctgtatttatatcagccaatgtatcattccttattaccactaaatattaaaactcaaatcgatattaataaattatttgtaggaagtaacattgatgttaaaaatagtagcttttttgtattttataaatatgcgattagttctacatatttaaaatatggtgagctatctttagctaatattttgattgaagcgggaatgatggcgcaaaatttttccttagtaactacagcatgtggttttgggtcatgtccaattgcaggatataacaaaagatttattgaagatatttgtaatttagatcatgttaatgagcatataatttttactgaaagttgtgggagaaatgaatagcgatacgattttttttgtaaaaaaagatacacatattaattctaatataaacgaatggatattaagtaagggaataattcataaaagcactttaacaataagtaaaaatgaaagtagtactttgtttgtaagtttattcaagcaattaatacaaaatcaggaaattaaagttagtgaagatgatgaagagtattcagactttaaaaaacttgttcagcttggatttttaggaataagaaataaaaataaaaaagtagcacttattgtggaagaaagtgcaaaaaacttctttgaaaactatttaaaagatgaaaatatatgtgttagctcattagatgaggagactgtaaaatattttgtgtaaggatgaataattccttaaatttatttcttaaaacattagaaaaaggagttcctttctcgtatgattggtttgaacaaaaaaacacatacagaaagaagaactccttcatgaatgattttacaaaaaatatagcacaagctctattcaatcaagacaaaataaacgatttattgcgcaaagagctacaacaggctgttaataacttgctagaagctgaattgactgcctttctgggctatgatccctatgccagaaatggctggaatactggcaattctagaaatggtgcttatttccgcaaggttgatacgcagtttggaccaattgaagtgcaagtgcctcgagatcgcaacggccagtttcatcagcacacgctgcctgactacaagcagcactctgatgttttggaaagcacgattatcaagctctactccaaaggcgtaactaccagagaaatcgctgacttgattgagaaaatgtatggcagtcattatagtccagcccaagtatcaaatatttccaagcagatgctccccaaggttgaggcttatcacaagcgcaagctaagcgacaagtttttctgtgtctatttggatgcgacataccttcctttgcgccgagaaacgtttgagcgtgaagcagtctatattgccattggcattaaacctaatggacataaagaagtcattgactactgcattgcgcctagtgagaacattgaagtctggacagagatgcttcaaaacatgaagtccagaggcttgaagcaagttgagctctttctttctgatggtgttgttggcatgaaagcggccttgaccaggacttatcctaaagctcattttcaacgctgcttggttcatgtcatgcgcaatatctgtgctaaagtccgggtggatgaccgcgaaaagatcatgaacgaattcaagcagatacatcaacagacaagccaaaaagaagctgcagctgtcttgcatgaattttatgcaaaatggaataaagcttatagccatgttatcaaaggtttgagggaaattgagcccgatctgctggtcttctacaattatcccaaacaaatcagagcttcaatttattcaaccaacatgattgaatcctttaacaacgtcatcaagcgtaaagctaagcctaaggcagaatttccaactgaacagtcgcttgatgtatttattggcatccaggcaatgagctacaatgaccgctatttcaaccgaattcataaaggctttggtcaggttcaggataccttagaatcctattttgattaaataaatgattaaaaaatcaatttacgagaaagaactatttacacaaaagatttgacagtttctagatgagtttataactcaagatacattaaatattttaattgaagaaaaaaataatactaaattaaataaaatagttcaaaactataaaaataaatacaaagatgtagatttgatttttgtttgttctttgtattatgaaaattatttaaaaggaatcaacaagctaactaaattaattagtatcccatataatataggattttatgataataataatatatttgctactagaataatacatggagagactggctgctatcaatgtcttgaaaatcaaatactacaaaaatttgatggatatatcgaagattatgtatcagaaatggattctgaaaaacaagtatttgatataaaaaattatggagtattaatatctataattaagtcagagatagaagaactaaatttatactctgatacagagctacgaggaaatgttcttcatttttatttacctacttatgaatacaattttgataagaatagaattcaaagtgattgctcagtttgttctactataaataatattttatttaaagaacaaaatatgaaagcgtgcaatattttagccgaggttttaggtaatgataaatatcaagaataatttagaatataatttattgcgtcaacggatcttgggtggcgctataactggaatctggaaaaaggatactttctttattggcgaaagttcgtatccggtaatgaattataattatattactgcaaactttactaattttgaaaaattcgcttttcctggctatgttcccccgattaattatcatcttagtggctacggcttatcttataataaagctttatcggcttttctaggtgaaagtacagaaagatattctttttcagtcttatatcaaaacattaagcataatatcatttattctgattatcaaaatcttcagaaaaagtattctaattgttatatagtacctttaaattatattaatatttatttttcaaaagaagataaagaaaattatgaaactgtcaaatcttttgtgtaaatagttctttctcgtaaattgattttttaattatttatttaatcaaagtaggattctaaggtgtcctgaacctgaccaaagcctttatgaattcgattgaaataacggtcattgtagctcattgcctgaatgccaataaaagcatcaagcgactgttcagttggaaactctgccttaggcttagctttacgcttgatgacgttgttaaaggattcaatcatattggttgaataaattgaagctctgatttgtttgggataattgtagaagaccagcagatcgggctcaatttccttcaaacctttgatgacatggctataagctttattccatctggcatagaatttgtgcaagacagctgcagcttcttttttgcttgtctgttgatgtatctgcttgaattcgttcatgatcttttcgcggtcatccacccggactttagcacagatattgcgcatgacatgaaccaggcagcgttgaaaatgagctttaggataagtcctggccaaggctgttttcatgccaacaacaccatcagaaagaaagagttcaacttgcttcaagcctctggacttcatgttttgaagcatctctgtccagacttcaatgttctcactaggagcaatgcagtagtcaatgacttccttatgtccattaggtttaatgccaatggcaatatatactgcttcacgctcaaacgtttctcggcgcaaaggaaggtatgtcgcatccaaatagacacagaaaaacttgtcgcttagcttgcgcttgtgataagcctcaaccttggggagcatctgcttggaaatatttgatacttgagctggactataatgactgccatacattttctcaatcaagtcagcgatttctctggtagttacgcctttggagtagagcttgataatcgtgctttccaaaacatcagagtgctgcttgtagtcaggcagcgtgtgctgatgaaactgaccgttgcggtctcgaggcacttgcacttcaattggtccaaactgggtatcaaccttgcggaaataagcaccatttctagaattgccagtattccagccatttctggcatagggatcatagcctagaaaggcagtcaactcagcttctagcaagttattaacagcctgttgtagctctttgcgcaataaatcatttattttgtctggattgaatagagcttgagcaaaatctttggtaaaatcattcatgaaggagttcttctttctgtatgtgtttttttgttcaaaccaatcatacgagaaaggaactcctttttctaatgtttaaagaaataaatttaaggaattattcatccttacacaaactattttacagtctcaaaattatataactaaaaaagatccaataagatggatagcattaaattcactatttgatattaataaaaaggtactagttccgcttcagttttatattatgtataccaacagtatatttaaaaatgaaaaaagaattgtaaatagtgctacatcaacaggaactgcttcgcaagaaagctttgataaaagtctggaaaatgccatagttgagttcttacaaatagattcttttaatctttggtggtatggaggtctaagaggtaaaaatttaaatattgatacagaaggcttattaaaggaattgttcccaaacaataatagactttggatgtttttaaaaaaatttacggttaattttatagatattagttttgacaaagcaattaatgtagttgtttgcgaaattaccagtaatagtgatagtaaactacctaaatatgtagtaggagttcaaggaggattttgtttaaataagtgtattgaacgatccttttttgaatgtgtaactgttttagaatattgttttactcaaagttgggttgaaggttctaaatttaaaaagatttctacaaatatagatgatttaaatgtaaataatttagacgataatgtattgttttatgctaaaaatggaaagcctaaattaatcaaaaaagagaatattttaagagtgtccaaaaaggttactaatttaaaagatttgcttttgaatttaaagagcatctctaagtatgcaggatatttaaatattacgcctccagaatttagaaatcaaaactttgaaatatgtagagtatttataccagagcttttaccaatttctttaccgtcttatccgccttattatcatccaagatacagtaaaataggaggtattattaataatgtcccccatcctttggcttaaaatagcttttttcatcactttgtttccaggcggaatatatttgataataagaagaatattgtccagccatagaaaaagcataacagtatatttaataaccttggtaattgtagctattgtaaataccattattttaaagatcaattttaataggtatattgaaatcatcttaatattgattattccttttacgtattatttttttgagtatgttataaggtataaaagattcaatatcttaagttttaaggctaataaaacaattatttatgttttagttttttttcctatatttgaagaagttgtttaccgtttctttatatttaaatattgttcggttttaggcttttctggaatacaggctatgatatttgcaacgttatgctttgaattttcgcacatatattatttaggctttaaagctattaataaattatttttttcctttattcaaagtatgttgtttttggtttttcaaagtttattgtgagactgtaaaatagtttgtgtaaggatgaatgattccttaaatttatttctttaaacattagaaaaaggagttcctttctcgtatgattggtttgaacaaaaaaacacatacagaaagaagaactccttcatgaatgattttaccaaagattttgctcaagctctattcaatccagacaaaataaatgatttattgcgcaaagagctacaacaggctgttaataacttgctagaagctgaattgactgcctttctgggctatgatccctatgccagaaatggctggaatactggcaactctagaaatggtgcttatttccgcaaagttgatacgcaatttggcccaattgaagtgcaagtgcctcgggatcgcaacggtcaatttcatcagcacacgctgcctgactacaagcagcactcggatatcttggaaagcatgattatcaagctttactccaagggcgtgaccaccagggaaatagccgatctaattgaaaagatgtatggcagccattacagtccagctcaggtatcaaatatttccaagcagatgattccaaaggttgaggcttaccacaaacgcaagctaagcgacaagtttttctgcgtctatttggatgcgacataccttcctttgcgccgagaaacgtttgagcgtgaagcagtctatattgccattggcattaaacctaatggacataaggaagtcattgactactgcattgctcctagtgagaacattgaagtctggacagagatgcttcaaaacatgaagtccagaggcttgaagcaagttgaactctttctttctgatggtgttgttggcatgaaaacagccttggccaggacttatcctaaagctcattttcaacgctgtttggttcatgtcatgcgcaatatctgcgctaaagtacgcgtcgacgatcgtgaaaagatcatgaacgaattcaaacaggtgcatcaacagacaaacaaagaagaagccacagctgtcctgcatgacttctataccaaatggggcaaggtttacagccatgttatcagaagcttgaaagacatagaaccagatctgctggtcttttataactatcccaagcagatcagagcttcaatttattcgactaacatgattgaatcatttaacaatgtgatcaagcgcaaagctaagcctaaggcagagtttccaactgaacagtcgcttgatgcttttattggcattcaggcaatgagctacaatgaccgttatttcaatcgaattcataaaggctttggtcaggttcaggacaccttagaatcctactttgattaaataaataattaaaaaatcaatttacgagaaagaactatttacacaaaagatttgacagtttctttattgttaataatatgtttacacataatttttaatttatatgtgtatttacacaaaaaagatatgtataaagttattttttgatattgacttgtattacgtatataacaatatgtgccacacggtttctagaaaaatcctaaagagtgctaattttaaaagcaaaaattgttaagccttttacgcttctagtcagcattagaaatacgtttaagtctttcaaataagttcaatgaagcttgatttgaaaggcttttttgctactttgaactagaatgaaattctttgaaataataaggatttatttgaaattaacacaattcaaacacacagatacgattcatgtgttaagaatgtgcttgaaggaaaattaagagtactaaatatagtgatttaacaggcgttggagcctgttttttttgtgtttggttagggcattttgtttaaattaaattcagtggatttttgtgcaaaaaaatagccatattgtagggttatacatattgactattttctattattaaaattatttcaattcagccacaaacctaattccttgataagaaggaaacttgtaattatcccatgaaaaataagtgtctggaaattagttctttctatttaatctcaatgctatttcaagttagctattaatctgtatcctaagaatccattgctagattttgagactgtaaaatagtttgtgtaaggatgaataattccttaaatttatttctttaaacattagaaaaaggagttcctttctcgtatgattggtttgaacaaaaaaacacatacagaaagaagaactccttcatgaatgattttaccaaagattttgctcaagctctattcaatccagacaaaataaatgatttattgcgcaaagagctacaacaggctgttaataacttgctagaagctgagttaactgcctttctaggctatgatccctatgccagaaatggctggaatactggcaattctagaaatggtgcttatttccgcaaggttgatacccagtttggaccaattgaagtgcaagtgcctcgagaccgcaacggtcagtttcatcagcacacgctgcctgactacaagcagcactctgatgttttggaaagcacgattatcaagctctactccaaaggcgtaactaccagagaaatcgctgacttgattgagaaaatgtatggcagtcattatagtccagctcaagtatcaaatatttccaagcagatgctccccaaggttgaggcttatcacaagcgcaagctaagcgacaagtttttctgtgtctatttggatgcgacataccttcctttgcgccgagaaacgtttgagcgtgaagcagtatatattgccattggcattaaacctaatggacataaggaagtcattgactactgcattgctcctagtgagaacattgaagtctggacagagatgcttcaaaacatgaagtccagaggcttgaagcaagttgaactctttctttctgatggtgttgttggcatgaaaacagccttggccaggacttatcctaaagctcattttcaacgctgcctggttcatgtcatgcgcaatatctgtgctaaagtccgggtggatgaccgcgaaaagatcatgaacgaattcaagcagatacatcaacagacaagcaaaaaagaagctgcagctgtcttgcacaaattctatgccagatggaataaagcttatagcaatgtcatcaaaggtttgaaggaaattgagcccgatctgctggtcttctacaattatcccaaacaaatcagagcttcaatttattcaaccaatatgattgaatcctttaacaacgtcatcaagcgtaaagctaagcctaaggcagaatttccaactgaacagtcgcttgatgcatttattggcatccaggcaatgagctacaatgaccgctatttcaaccgaattcataaaggctttggtcaggttcaggataccttagaatcctattttgattaaataaatgattaaaaaatcaatttacgagaaagaactatttacacaaaagatttgacagtttctattcaagaataagatactaaatatttagtatcttattttgcatacaattaggctgaaaaaacacaaaatactaatgttataattgattttagaacttaacaagaaattagggaacttttatgaaccaattatatcaagaaattaatgatgctttatatcatgtatattacgggattcagcggattgaagaagaagaactaaagaaaagtcgtttcaatgatcttactcctaaggaattgcatgcagtagatgctattactatgtatgaacatcctactacttcgcaagtagcagaaaaattgcatttgtcacgagctacaatgactgtgactgtcgatcggctagttagaaaaggctatgttgaacgaatccgaggtaagcaagatcgtcgtattgttcatttaaaattgacaatgcgaggcagagtagtgtgccgagcatatcatgcttatcataatcgaatggttaaaagttttttgcaaaatctagatgagaatgaattgcaaacaatttatcatgcatttaaaaatctggatgagtttttgaactcacactaatattattttgaaattgcttaagcagactggagatattcagtctgtttttttgtggacgaaaaaaatttaattacatagaagtgttcttagtattagtgtaaatagaatttttgagttctatatgaacttgtaatgtgttgacaataaaaaaagagatgataagatttgaatatcgaatagttagatatactaattttaaaaaacgaacatggagatgaagttatgccaatgaatactgctgagattcaaagcaagttagattgtcaagctcccttgatgctgttagatcgagttacaactttgaataaagatcaacaagtaattgctcaaaagagtgtgagtgctaatgaatcttattttcaagggcactttcctgagaatccaataatgccaggtgtgctgctaattgaagccatggtggaggcaacacaatttatgtgggatcggtcagatttgattcttactagagttaaaagaggccgctttcgtgagatggtcaagccagggatgcagttgacaattaaggttaacgccattaaaaaatacgcatgtcaggcaaaggttttaattgatgataaagatgtttgtgtagcagacttggaatttaaggtaacagaagaaaattgaaagatgtaaaaattatagcaactggttttgctgtgcctgagcatgtcgttactaatgatgatctcagtaagatcttggatacttcagatgaatggattgttaaacgaacaggcattaaaaggcggcatattagtcaaaatgaaaatacttcggacttggcaactcgtgtagcaaaaacattattgagtcagagtaatgtaagaactcaagatattgatctgatagttgttgcgactatgacacctgataatatgacaccagctacggcagcgattgtccaaggcagaatcgctgccgaaaaggcggtatgttttgacatttcagcggcttgttcaggcttttcttatgctattagccttgctagaagcatgatgcttaccaataattggcgtcacgcaattgtaattggcgcggaggttttatctaaattgctagattggactgatcgctcaacggcagttttgtttggtgatggagctggtggcgttttattaagtcaaagtaatgccactcatttattgggacaaagtttaaaaacttatggtaataaaggtgatcaattaattgcaggtcatttagatgtttcttatgacattttgaaaaataaaaaaagctatcagcctttacccaatgtcattaagttaagacattgacaattaatattagacttttaaagcactgatttaacatttaattggttaaattggtgcttttttcgtacaacaaataaggcatagcacagattctgcttttttaagctacgcgatataaataatatacagctgatttgggcttaatatttctcttgtccttgcggcctggtctaattggaatggtataatagctgatctgaataaggatccgttcaaaatcttgcgttaaagaagaagccaaatacatgctctgaataatcaagcatgattgcttgaaattgatggcatattgatacttgcaatgcttttgcggaatataggcctgtgcatcaatttgactgattgcattaaacataatcatatgggcataaatttccatttcaataaatttatcttgtttggaatggaactgtacactgcctaaagaatacttcaatttcttgaaggaggtctcaataccccaacgcagatgataaagctctttaattctttttagcggataattttttcgatcaagattggttagcacaacttcccattcttctttgcctgatttggcatcattaattctaaatttgcaggctcgaaattttattgtgcataactcgccaaaatcccagcttagatcctgggtatttttagagcgatacttaatatattggcgataatgatgctggacatggtgaatattctcactggctttatgcgtgatgtagtaatagttagaagtagttaccaggcaggaaatctcacgatcacattcttgatcaggcaatgtcgttatttctttaactccgccttgtccagccttagttcgtattatgtaatgacagttaggcaggcgattgcagttttcaatcatattgaaactagtgtagccacgatccattgttacaatatatggaccacaattcaaagctttaagcatttgaacagccgctttgcgttcatccatttctgatttaggctgaaaaatacaatcctggtaggtattattcaatagatcatataaggcattaacgtgaatttgacaatagggtttctttttatgagaagaagcttgtacaatgttattcgatttcggattccagatttgattaaagtcagagccatcaatggcaaacaaacggtagtgatgatcaaaaagttgaatattaaatagattttgattaaaaacagtcagaatatgtttaaaacaagcaggagaaagctggcttttgcgttgaacataggcagaagtactaactactttatcgttctttttagttgcatcttcgccaaaagctctaaagagttcactgtttaaattctgaccttgcatgttaattgtagttttaaggactgtcgctgcatctaaagtgcgtttcctggtaaaagcatgaggattattaataaaatcgtgaatatgatccccagtattattgataatttgatcaagacgttctagaatattcttatgaagggctttcataattaacaccatctttctggcaataattttgaaggtttaaaatatataatatataagataggcgaaaaggctggtcttttcgcctttattttatacaaaaaaagagatcgaatccaaatgattcgatctctaaaaaagcacccttaattgtcaatgtcttaacttaatgacattggcctttaccatgaatggacaagagatatatcgttttgctacgcatgaagtaccacggtcaattttgaaagcttgttcaaatgcacaaattgaacttgatcaaataaattattttcttttgcatcaagctaatagtcgaatcattactcaagttgctaaaaagttaaatcagcctttaagcaaatttggtgtaaatattgacgagtatggaaatacagcggctgctagtgaagcaattctgctggctgaaataattcagaaaaacagaattaagccaggcgaaatcattgctttaagtggctttggtggtggcttaacaacggctacattgattattaagtattaatacgaggagaataaaaaatgactaaaaaagaaattttaaaagatgtacaagaaattgcccaagatgaattagatgttgaaccggaaaaaatcacaatgactaccaacatcaaagaggatttagacgccgatagtctagacctttttgaaattttgaatgagttagaagataaatacgatcttgatttagatgctgatgagagcatccaaacaattggccaattagttgattttgtacaagcagaaatggataagcaaaaataatgagttacggtattctgtttagcggccaaggcgcgcaaaaagcgggaatgggacttgattttttagacgatgatctatttaaagaaacgattgaaaaagcaagtttagctagtcaggaagatttggttgccattcttagagatgaaaatggagaactagataaaacaattaatgttcaacctgctctagtagcctttgaaataggaatttttcgtatgcttaaaagagactgtccccatctaaatattagtagaatggttggtctgtctttaggcgaatatagcgcaatgtatgccagtggtagtctagatttagaaaataccctgagcttagtcagtgatcgggctcgttatatgcaagaagatgctgatcagattgaaaacggaatggcggctattttaaaacctaaactcaatgatattgaagttttaattcaaggcctgcaaaagcaaaacaaacgagtttatattgctaactacaattcgcctaaacaagtagttattgcaggtgaaaaatgtagcgttgcattagcttctaagcaaattaaagatcaagatttggctaagcgaattattatgctaaaagttaacggcgcctttcatacaccactatttaataatgcaaaaactaaaatgacgaagcgattagcaaatataaagtttcaagaaagtaaaactccggttatatctaatacaactgctctgccttttagtggaaattggcgtgagattatggctaagcaattaacagtccctacgcattttggctcatgtattcaatatttagttgaacatgagcaaattgatcaaactttagagattggtccaggcaaggtgttatcttcatttgctagacaagtagatcgtcacttaaagtgtagccatattggcaattatgcagaatatcagacttttgtagaggaagaacatggaattaaaggataaagttgtttttattacaggctcaactcaagggatcggcgcagcaatggcagttgcatttgccaggcaaggcgccaagcttattgtgaatgggcgaaaacaagagttgcctaaagatttaaaggatgcattggataaagagaatgctgattatcggtatttatcagcagatttagcacaggacaatttagaggagataggcaaaacagcctggaatttatttggtaagatagatgtcttgataaataatgcaggtcaagcaaaagataaaatgttcattggtatgcatgatgctgatttcgaagaggtattaaatttagatttgaaagtaccttttttcttgagtaaagcaattatgaaaaggatgaataaagagcgttccggggtcatcatcaatttatctagtgtagttggcttacatggcaatgtgggtcaagcaaattatgcagctgctaaggctggtctaattggttttacaaaatcaattgcacgtgagggagcgttaagaaatattcgagttaatgcgattgcaccaggaatgatagatactgaaatgacacaaaaattgtctgaacgtgttaagaaaaatattttggaacagatacctttaaaacgtttaggttcaactaatgaagttgctcaaggagcggttttcttagtgcaaaatgattatgtgacaggacagacaattgtaattgatggtggaatgaccatttaaagaggcaatatgcaaagagtagtaattacaggaatgggggccattgcccctaatggtaatggtgttgaaaattttgttcagaatactttagcaggcaaagttggcataaaaccaattacgaagtttgatgcatctgaaacaggaattagtgtagccggcgaaattgatgattatgacgaaaatgattatgttggcaaaagagaagcaagaagactagatttgtattctcaatatgctattcaagttgctaatgaagcgatggaaatggcagggattgatgaaaaaaatactgccccggaagatttaggcgtgatttttggatccggaattggtggattgactactattcaagagcaagtaattcgcatgcatgataagggacctaaaagagtatcaccactatttattccgatggtaattgctaatatggcagctggaaatatctctatccgttttaatgctaagaatatttcaacttcaattgtgactgcttgtgcttcaggaactaattcaattggtgaagcttatcgtcgaattaaagaaggtgatgcacaggtaataattactggtggatcagaggctactattaatgaaacagcaattgctggtttcgcagccttaacagctttatctactagtacggatcctgatcgagcatcactaccatttgatcaaaaccggaatggttttgtgatgggggaaggagctggagcactagttattgaaagtttagaacatgctcaaaatcacggtgccaaaattttaggcgaaattgttggctatggcacgactagtgatgcctatcatattacttctcctgatcctaaaggagttgaagcagctcgttcaatgaatcaagcaattgtacaggcaaatattgatcctagtcaagttggatatgttaatgcacatggtacagctacacatgctaatgatgctggagaaagcaaagcgattaaccaagtttttggaaaagatagttcagttttagttagttcaactaaaggaatgacaggtcatttattaggagctgcaggtgccattgaagctgtaattactgttgccagcttagaaaaaggaatcttaccaccaaatgttggttgttttaagcaagatccagaatgtgaagttaatctagttaataaagataatcaacagcaagatattgagtacgcaatttctaattcttttgggttcggtggacataatgccgttttagcttttaagaaatggagcgagaattaatggacttagaaaaaatacaagctttaatgaatcaatttgaagattcagatttacgtgaattgaaaattgatgatggtgatttccatttctatttaagtaaaaacaagaataaagttactcagacagtacagccgactgttcaaaagaccgctaaaaaagtggaagaaacagctcaacctgttgttcaagagaatattgacaccaaggttaaaccggttaaagcacctatcgttggagttgtttatttgcaggctaaacctggacaaccagcctttattaatgtgggcgatcatgttaagaaaggcgacacaatttgcgtgattgaggcgatgaaaatgatgacggaagttaaaagcactttaaccgggactgttagtgagataaaagttgaaaatgaagacctggtcgaagtagggcaacctttaattactgttaaggaagattaatttatgagtaaagaactagggattgacgaaattaaacaaattattcctcatcgttttcctatgctgttaatagatcgcgtcttgtttctaaaagttggtcaggaagctaaagcagttcataatgttagttttggtgaaagctttgttcaagcaagttcctctaaagatccagtttttccttctattttaattgttgaagccatggctcaaacaggtgcagttgcattattgagcaaggcagattttgccggcaaaaccgcgtattttggtggaattaaggaagcaaatttcattgttcaagcaaggccaggggatcagatagttttgacaacaaagttaactaaaatcagaaaaaatattggcattggcataggtgaagcgtgggtaggcaataagaaaattgcacaagcagaactaacgtttatgattggttaggtaaaatgaatgtttaaaaaagttttaatagcaaatcgtggtgaaattgctgtccgtattattcgttctttgaaggaaatggggattaaaacggttgccatttattcaactgcagatcgagaaagcttacatgttcaattagctgatgaagctgtttgcgttggtggcccgcaacctactgagtcatatttaaatattaaaaatattttagcagcagccgtaggcatcggggcacaagctattcatccgggatatggttttttatctgaaaatgcagaatttgctcaaatgtgtgaagattgtggcttaacttttatcggccccaaggcggaaacgattgatcaaatgggcaataaggaacatgcgcgtcaattgatgatggcacacaatgttcctgtaactccaggatctaatggagttattaaaaatgctgaagaagctaaaaaaattgctgctcaaattggttatccagttttgattaaagcaacagctggcggtggaggcaaaggaattagacaagtaactgatccaagtcaaatggccgaagctttagcggctgctcaaagtgaagctaaaaatgattttggagatgatcgaatgtatctcgaaaaggtaatgcaaaatgtaaagcatattgaggtgcagatttttcgtgatatgtacggtcatacggtttatttccctgagcgtgactgctctttacaacgaaataagcaaaaagttttagaggaaagtccttgcgatttaattacggaaaatgaacgtaaagaattgggtgaggttgcggttaaagctgcccgagccgcaaattatgttaataccggtacaattgaatttttgatggatcaagatcatcatttttattttatggaaatgaatacgcgtattcaggtagagcatactgtaactgaaatggtaaccggtgttgatttagttaaagcacaaattcaggttgcgaatggaggaccactgccttttacgcaaaaagatttacgggctaaaggtcatgcaattgaatgtcgaattaatgcagaggatccagcaaataattttatgccatcaattggtaaagtttcgtacttatatttaccagttggcaatccggggatgcgcattgataccgccttatatcagggacaacaaatttctccttactatgattctatgttagctaaggtagttgctttgggcaatacacggaaagaagcgattgctaagatgaaacgcttacttgaagaaatagttctgcaaggtattactaccaatcaagaatttcatttaaatatactaaatgatccaacttttattaaaggtgactttaacaatacttaccttgaacaaggctttatgccgcaatggaggagtgaaataaatgaaactatttccgcataaaaatactcctactgatacacatattaaagcaaataaagcggctgatgatcgagtacctgatggactgctgcgcaagtgccccaaatgccatcatgaaatatttgcgaacgaattaaataaattctatgaatgtccatattgtttttacggctttagaatctctgccaaaaaaagattatcgtggttagttgatcaagtacaggaatgggataaggatattgagtcctcgaatcctttaaaattccccgattatcaaaagaagatcaaacatgctcaaaaaattagcggcttaaaagaatcagtttggacaggcttagctaagattaaccaaacgcaattcgccttggctattatggatccaacttttattatgggatcgcttggtcaaatgactggtgaaaaattaacgcgtttgtttgaaaaagcaacgcttcagcatttaccagtcgtactgtttgcggcttctggcggagcaagaatgcaagaagggattcttgctttaatgcaaatgggcaaggtatctaatgcagtagctaggcatagtcaagcaggtcttttttatttagtagttttaacagatcctactactggtggggtgacggccagttttgctagtcaaggagatattattatagctgaaccacatgctatagtgggttttgctggtaaaagagtaatcgaacagactattcatgaaaaagtagcggcagatttacaagatgcagagaacgttttgaatcatggttttattgaccatattgttagacgctcacaggaaaaaagaatcattgaatggttaatcaaggtaggtggctatcatgactaaaaatgcaattgatatagttaaagctgcaagagatgaaagtcatatctctggtcatgagatacgcaaacttctttttcccgatttttttgaattgcatggtgatcggtgtggtactgatgatcctgctatagtaggtgggctagctacttttaatcaagagccagtaacagtaattacaactagcagaggacatttacttaaagaaagaattcaaaaacactttgggcagcctgaaccaggtggttatcgtaaagttctgcgtttaatccaagatgcaggtaagtttaggcgacctgtttttttgtttgttgatacagctggcgcttatcctggtaaaagtgcggaagaaaacggccaaggacaggcaattgcacaaaatttgcttaaagttagtcaaatacctactcctattattacggtcatgtatggagaaggcggctctggtggtgctttagcgcttgcctgcggagatgaagtttggatgttggaaaatagtatttattctgttttatcgccagagggctttgcttctattttgtggaaagatgtaaaaagagcaagtgaagcggcggaagtcatgaaattgacgcccgatgatttactcaagatgaatgtgatcgaaggtatcatcgccgaaccggataatcatcaagaggtttgtcaaaatatagcagaaaagctgcaaagtgagataaacaaattaagtaaattatccgaggcagaattgcttgctaagcgatacgaaaggtttagaaagttttagaggtaaaaaatgagtggatttttagcaggaaagaaaatcttggtaatgggtgttgccaataatcggtctattgcatggggatgcgctcaagcaatggaaaaacagggagcaaaaatcatttatacttaccaaaatgagcgattaaagaaatttattagcaaattagttactgatgaagattgcctgattgaatgcgatgtggcaagtgatgagagtattggacaggcttttggtttgattcaatctcgttttggcaaaattgatggcattgttcacgcgattgcatttgctgagaaagaagaattaggtggctcaattttaaattccacaagagagggattcagccaagcagttgatatttcagcttattctttcttggctgctgcaaaagctggaatcaaaatcttaaataatcctgcaagccttgttactttaacctatatgggatcagaacgtgccttgcctaattacaatactatggggattgctaaggccgctttggaatcggaaatgcggtacttagcgcgagacctgggtgaaaaaggtgttcgggtaaatgctatttcagcaggagctatgcgcactctggctgtctcaggaatccagggtcatgcatcattattgaagatttctaagagtaagactgttgatggtgttaatgtgacacaagaagaggtaggtaatacctgtgcttttttgatgagcgatttggctagtgggattactggagatgtaatttttgtagacaaaggtgtacatttacgctaatgcaaatttacaaatatcgaaaggttacttcaacacaagatcttgcaaaaaaatatttagcaaataaagctcaagaaattgctgcatttatagcacaggaacagacggcaggttatggcaagaggggacgctccttttattcaccagctaaaacaggtatttatttaagtattgcgcttcctaattttaagtttaaattagagcatgcaggcttattaacaatagctattggggtagcggtagttcatatactacaagaacaatttccttcgtatgaatttcgtttaaaatgggttaatgacatttatttaaatgataaaaaagtagctggtattctaaccgaaaaaataggattaggtttggtaataggaataggggtgaatatttttacggcatctttcccaaaaaatatctcaaatcatgtcggcagtattgtacaagctgattatgcttttgagaatatgaatgagcagttaattcgagctgttgtgcaggctgctaatacatatcaaaataataaatttttagacgagtatcgcaaaatttcttatctgaaaagtaaagttataactttgaaaataaatcattattatgtaacaggtcgagtagtgacaattgatgatcaaggacggttagttattagttgtcgaaattctacacgttgctattcaagtggtgaagttattaaggtggaattagaacccggatttaagggtaaacagtaaaatagtacaaaaaaagacttgagaagtaatttttctcaagtcttttagtttgtcttaatttaggttaattaaaacttgttcttgtccaaagcaactggagaatctggcttttcaccattgatcatcttcaagttgttgtcaaatgccttaacaaccatgttacgtacagcgtgggtggtgtagaaggcggtgtgtggagttaccaaaacgtttggacgatcaattaagtcagctaaacgcttgtctgggaattctttaccttcccaatcttcgttaaatacaccaacttcgtcttcgtaagtatccataacaaagccaaagatcttacctgagtccaaaccgcggataacagcgtcagtgtcaacaagtggaccacgtgagcagtttacaattacaacgccatctttcatcttggcaattgattcgtaattgatcatgtgtacatttgctggaacatctggtacgtgaagtgaaattacatcagcttgcttgtacaagtcgtcaagtgagtcaacgtagtaacccttcttttcgagttctgggttcttgaagatatcgtaagcaatgacctttgcgccgaaaccttccataattctcataaatacttgaccaatgtgaccagtacctacaacaccaacaacttggtcacgaacttcacgaccaatagtaggtgcccaacgtaagtcgcgcttagccatcttttcgtccatacgcttgtcttgacgtaatacacgagcagcttggattgcagcatgttcagcaatagcgtcaggagagtatacaggaacgttagtaatttcaaagccaagttccttagccttgtccatgtcgatgttgtcgacaccaacgttacgtaatgacatcttagttacgccagcgtctgccaatgcttgaagagtttctggggtgtagtctaattgttggtaaacaacaacaccgtcagcacccttagctaacttagcagtttcaggagtcaaaagcttatcagtgtaatctacatcgatatccttgtgagcatccttccattcgtttaagaatggttcttcgtctttacgaatagcgtaagcaaaaatctttgtcataaatttaacctccgtaaaatttattagtatgaccagtcctcattatacgcttttacttgctcaacaaaacacaaaagaaccatttttttgtatagattttaagaaaaataaaagtcaagttttactctgagcaaaaaagttgcaattttttcaaaaaaagtttatagcctaaaaattgcaactattattaactgttacctaatctcaatcccatagatatgaaaattatttttgtatatagcaatattagttaaaggtagtatatggatttgtataagagacgcattttcgttatataacccaggttatataatggactttaagtagagaaacaaacatagcggaggaaaattgaatatgcattttaaaggagaaagccaacagcatttcagcctaagaaagctgacaattggtgttgcttctgtaataatcgggaccacctttatgttttttggtggtcatgctgttcatgcagatgatttaagtagagatgctgagcaaaccagctcagttgttcaaaaacagagtagtgagaaaatagatgtagatgcagtcaaagaagctgataatgtttcaaatcaaagacaagacttacccagacggtactaagagtaccgcaactgttcctgtaactgtcattgcaccaaatgtaccagacgttatctacgtaccaaagggtgacaagtttccagacccaagtactgtagttactaactctaacgatatcaaggacaagattcctgacacgacttacacttggaaaactactccagatactccaaatactaaagtagtaattaactataaggctaataatcctggtactccagataccccagttactccaccagtggatccaggcgataatccagcaaccccagttaccccgcctgtaaagccagagcagaagccaacaacaccaactcctcatgctactaagacaccagcaaaggataatggtggcaagaagacagtagctagtgagcaaaaatctactttgccacaaacggggaagaaggataacgttgctttgactgctatcggtgtagctattgcagctgctggaagcttattaggattagcagatagcaagaagcatagatcttaatttgtaatatctaatttctgtttactaagaagcaagttgactcagataggagctagcttgcttttttgtctaaaagtttaaggatttctaaagacaaaaagcaaatagtgacgcattgtcataaagctgatattatatactcataacaaaaatacaacgcatcaaatagagatgaattgtaagaaggtaacaaatcttctaattccttattaatacatcctattgggcctttattaattcatacattgggtattgctttttgctggttgtcccctatgcaaccgcgaaagttaagattgataataagtccatcccctttttgcgaaggtaaagagtcaagcccccctgcaacatctcttgcgttgaatcttttgttaatcttgataatttatcttcgcaacattagtgatgagtaggctaatgtaaaaaaatctcgttattctcattcaacacaactcccttaaaagggctggtttagaaaagtcatctaaatcagtcctttttctttttttcgttataattaaacttgagaactaaaacaaaggggaagaaaaatgatcttaatttcatggaatatcgattcattaaatgcagctctgactggtacttcagctagggcggaagaaacgcggcaagttttaactaaaattcatgatgccaatccagatattattgcgattcaagaaactaagctgcgtgcaactgggccaactaaaaaacataaagaagtgttggctgaaaagttccctgagtatgactatgtttggcgctcttcagaagaaccagctagaaaaggctatgctggtacaatgtatctttataagaaaggattaactcctgcagtgtctgagccgattattggcgcccctgagccgatggatcatgagggacggataatcacactggaatttgataaatgctttgtcacccaggtttatacgccaaattcaggcagtggtttaaagcgactagctgaacgtcaagtttgggaccaaaagtatattgaatatctgcaaaaattagatgaaaaaaagccagttttagctagtggtgattacaactgtgctcataccgagattgacttgaagcatcccgaaaataatcatcactcagcaggttttactgatgaagaaagagtcgactttaccaatttgctcaatgctggctttaccgatacctttagaaaagttcatggtgagattactggcgtatattcttggtgggctcaacgtgtcagaaccgctaaggctaacaactctggctggagaattgattactggctagtaagcaatcgcattgctgataaggtggtccgctcagagatgatcgatacaggcaaacgagcagaccactgcccaattttgcttgaaataaatctttaaattgaagcaagccctagtataatttctttttgaaatgtttttattttgaaaaagaagtaggggttgaaattctttgaataacgagaaaaaagaagattgggctttggagcaggatctgaagtacaatcgtctgacagcatttaagctattcgcgatgactagttcaatggttatttccgttgatgaactcgcaccatttggtaaaactggagcaacggcactgttttacttgttaattgctggaatcgcttggtttatcccgattacgcaaatggctggagaaatggcctcaattgatggctgggaaaaaggcggaatcttcacttgggtgaaaggatctcttggagacaaaacaggctggacagcaatgttttatcaatggattcatattactgttggtatggatacgatgatgtatgtgatcattggggcattgtctatcacatttgggacaccttggttcaacaccacgccaatcgtacgcttcattttaatgatggttattctgtggggagcaacagcgattcaggtaattggtgttagaaagattggtcgaatcgctgaatggctgtttattctggggattgcgacaccagtaattttattgattatttcattcttcgtatatgtgattcaggggcatcccttgcatatgacgattaactggaatactgtaattccacataaattgaatggtaatacattagttgcctttgtcccatttatgttggccttttgtggtggggaagcttctgcaccgcacgttaaaaacttggaccacatcaagtcatactcaaaagttatgcttggcttagccgttactgcaatctgcttcgacttgctaggtagtatggcaattggaatgactgtgcctaaggatcaaatagagaacagtacaggctttgtttatacctatggcaagctgttaacgtcaatcgggctacctggtgatctgttgcaaaaaattgtgggtataatgttagcctgcggtattattggtgagctaggcaactggattgctggtcctaatcagggaatgtatgaagcggctaaagagggctatatgcctaagttttttgctaaaaccactaagcacggcgtgccattaagaattatggttttacaatcaagtatcgttaccatttctgcattattgattacttttaccagtggtgccgatgcagattttgcgtttaacgtttcattggccgcaacgacggcgcaatatctcatggtttatatgattatgttgattgcttacatggttttgaaaagaaagcatgaagattatcaccgtatgtattacatgagcaagaaccctaatttgagtattgcaattgcggtgcttgcattaatcatcacggttatagctttctttgtaacttttgttccagcacaaggcacgccaagcaatttgcgtcacgtttatgtttggaccttaatcggcatgtgtgccattgtgtcgattttgccacttattttgtatcgctggcatgaaaaatggcaatcacaatagaattaagaagcattcgtttttcaagacggatgcttttttagtagaatttgagagaggtgaataaaatggcggatgcgatgagggatgcaatattaaatggttttgttgatcaaaattatttaggaagtgaagaattaggtcctaaaatattagctaataatcagcaagagagaatctggcagaatttgcgccaggaattgtatagttgcaagtcctttacttgggcggttgcgtttattacgcaagacatgctagttccgtttaaggtgataatggcagatttagcgaaaaatggaattagtggcacgattattactggtgattacttgggttttaacaatccgcgtgtttttacggaattacaaaagattcctaatttagaagttcgtattgctaataaggcaggtttccatactaaaggatatttatttgatcatgaaaactatcaaactgtgattattggcagtgctaattttacacgttcagctctgctggctaactatgagtgggctttgaaagtaagttcaaaaaagcaagcagatttaacagctcaattagtggataaaattgcagatttgaaacaggatagttttgttttaaattcagcctggctaacagattatcgtaaaaattgggtaaagcctgagcgagttgctactgatcggcatcagacaaaaattttaccaaataaaatgcaaaaagcggctttaaaacagatagaagcactagttacaagtggtgaaaaacgagggctagtagtgtcagccacaggaacggggaaaacttatttaggtgcttttgctgttaagaaatatcagccgcggcgttttttatacattgtgcatcgtgagcaaattgctaaaaagtcattagaaagtttttatcgtgtaatcggtggaccaagatcggattatggcttattaacgggaaataggcacaatttacaggccaagtatttatttgcgacggtacaaacgataagtcaacctgagatgctggctaattttaatagcgatgaatttgattatatcttgattgatgaagcacacagggcagctgcaccttcatatcagcgccttttacattattttaagcccaatttttggttaggaatgacggctacgcctgaacgaatggatgagcaaaatgtttaccagatttttgactacaatttggcatatgaaattcgtttgcgggatgcactggaagagaagatgctggcgccatttcattatgtgggtgtccaggattatgaagcagacggagtagtgattgatgaaacaacagatttacgctacctagcttctacatctcgagtagactatgttttaaaggaattagactattacggctattgtggaacaaaggctaaaggcttggttttctgcagtcgacaggatgaagcacgtgaattagctcggctttttagtcaaaaaggacatcccgctgtagcattgaccaatgaggataatgaaaaaagacgtaatgaagtggttgcgtctttagttaaaggtgagattgagtatattgtagcggttgacttgtttaacgaaggaatcgacatccctgccttgaatcaaattgtgatgttacgcaacacacagtcgagcatagtgtttatccagcagttaggccggggcttcgtaaatatcctggcaaagattttaccgttgtgctagattttatcggcaattataaaaacaattacatgattccgttggcactgaatcaggatacttctcgaagcaaagatcaagctaaacgagaaacgcgtctgccaagctttattgatgtttcaacgattaactttagtaaaattgccagtgaaaaaattttggcttcgcttgatagtgtcaagcttgatgggatgcgtgaattgcggcagagttaccatgatctcaagaacaaactagggcgtgtaccgctactatttgatttttatcaatatggctcagttgcaccgattgtttttgcacaaaatcatggcttggcaagctatgctgactttttgggtaaaatgggcgaagacgttaatttatcaaaatatgaaaatgaagtgctgtcttttgtgactaaggaattacttaatggtaaaagaattcacgagttacttttgttagagatgctacttgaacaagatattgttaagcaagaagattatctagctcaattgaaacgacaccatgcttatgtaaatgatgaattgttagcttctgttgatgcgattttatcgctagatttttttgatattaagcagggaaagactaccaaaaaagcacaatatggtaaattgccgttagttgaacgtagcaatttatttgactatcaattgaatggttctctacgctctgccctagatcaacatgattttaagaatttatttgttgatgctattaaaactggtttggccttaaatcaggaatatgataatcagcgtcaatttactttatatcagcaatatgatcgtaaggacgcttgtcgactcttgaactggcctaaggatgtttcggccccgatgtatggctatcgtgttggtgagcaggacacaccaatcttcatcacttatcataaagatgatcatgaaaagcggaatgctctgtatcgtaatacattggctgatgggcgcagtttgcgctggtatactcgggtaccacggcatttagattctgatgaggtacagcgtttgcttaatacgcgagggatgaatttgcatatatttgttaaaagaagcgatgcagatggtaagcagttcttttatttaggcaaggcaaagattcaagctgattctgttcgcgaagaattgctcggtgttaagaaaaagccagctgtagggatgaacttaatgttgaaacatccactgagtgagtcaatgcatgagttattatttgaatagaccaaaaaagcctttccgcttaggaaaagcttttttaattgccgctaatattaattagatcttggtcatcttggttattatccttatcaaacattctaggcttgatgtgatctagaatcttagtcccgatatttttctgagcagtttcatcaccgctaacctggtttaaaaacataattattccatatcgattatctgtagtcattttgatccaattaccaaaatgagtgttgcttaagctaccataagcagatttagtatggtcatcatctaaatgaagccctccagaataattagtggttgcacttttaagatgagttaagtaatagaaatcggatttgcttaagatactaccattggttaagccaagctggatcttgtaataatccattggggtagtgaacatattgcctgcgcctggaagctgggaggcaagagtctttttaacgtattcagcgtcttggtaatttttaccattattccagacgtaagagataggatcggttttccaactaggaatatcctgataaaggaatgtattagcaagccctaatttgttaatgatgcgattattgaaattgttttcgtaggattgtccgctgattttaataataattccggctaataaaagatagttggtattattgtagaagtaggttcctggtgtcccttgagtgccgttattagtattatcaatagcccaattgatggcgtcattctcacttaaaacttttccgcgatccaattcagtattggttgcttgaatgccagaagtatgggtcattaactgtccaatagtaatattatcggcgtttttaagattagggtaccaacgtgaaattttggtgttttgcgtaaatttttgactagtgtgccagttttcattcatcagctgaattatcattgctgctgtaacaactttttgcaaagaagcagttggataaactacgttgtcgttcccattaccaacttttttaccgtaccaagcgtagccatagctgatttgttgcggctgaccgtttttgataatgacgatactaccgcgagtattgttttgagccaaagtattgcggacaaaatttcgcatttcggttttaaagtatgaactggcttgaacttgtggtggttcagtgatcgcaaatgcaggaactgtcgttagcagcgcagcggtagctagtccaataattgattttttcaaaaattaaaaggcctcccttaaaaagtggtttgtttacattttagcgcgttctttgcatcggacaaactattatcttggtgaaaagacgtatttttagctagcttgttgaaaaagtgcggctaattttgctctgagtgcgggatcatgagcgtataaataggtaccgcggattcctcgcttgaatagaacgttgagtgaattcatgaccatcttctcttcatattctattttttcttttgagttggttagatcattacgctttttgaacatctcaacatctgtaattttgtctaaattaactttaagttgattggtgcggggaatcaggctgattggtggaccgataatgatgccagcataatttaggtcaaaaccttggcaagtatagatagaaccaacttcattgattgttgtaggaatttctgcccaaggagttgatgtgtagttgtattgatcccatggcagcataaatttcccttctttaatgtaatgtttgccaccatcaagagtagatggatagccggaagttgaaagaattcttgccaggccgtctgtttgatttctcttgacgatttcttgccgcattttttctgcatcagtaaaaatacgaaagtcgtagttgtgccacatttctttttttaagggcattaatttattatgtgtaaaaaagttaaaccattctattagactatctggtgccatcattctaaattgatgatgtagttgatagtcttcgtggggataatgatgagtaattgcttcaagtcgcttacgtgtccagaagcttttcattcgtaaaacttggttttcatcaaataccaaaatgataacttttgaccgcttaataacctcctctaattggttatcgtgataaaagttgttgtagtgatcaggctgagataagagcaagtgtgcttcatcaatgacgacaacatcagcactggtttgttttttgtccatctgattaataaatgaagttggccgcatataatttttcttatatagttctttaatcggcccagcaatctgcttatagacttttagcagttcagggtgatttactaaaaagtagttttgagttttatacagttggctgcctgtttggtggtttaatttttgcaactgatcaaaaagggcagaaagcactacacttttaccagtacctgcttcaccataaatagtgaaaacagcaggatgatttttattgctgcaatgtgtaatcgaaaaatgtaaaattttttgtacgagaagtgattgctcttggttgagctgatggtaaggagagagtttaaaacttgcttgattattcaatatttattcacctcgttttcaattataatgaatagaaataataatgataaaggaagaaaacatgactgcacaaaaaataattcacaatcggctatttttaagacaaaaatctgatttagctggcaaaaatgatttacaagttgcgataaacttgcgtgatacgctactagctaatcgtgggaaagctgcggggctggctgcaaatatgattggtcagactaaacaaattattgcgttttatgctggcccgcttccatttgtaatgctgaatccgcgtattattcaaaaaaagcagatgtatcttgctagtgagggatgtctgtcactagaaggcgagcgtaatgttcagcgctatgaagaaattactgttacttatcagaatatggagttagaaacagtaacgcaaacttttggtgactttatagctgaaacgattcagcatgaaattgatcattgcaatggaattctgatttgaatagtagaatatttacgtgattttgcaaaaaaagtaaaaaaatttaaattaattttgcatggtttcagggatgaaaacccacaattttcgaataattagatttgatagaataaaatactttttaatttaatgcaaagataaagaaaaatatattacaacactacctagtgtatcgtgaagaacccgaacgaagagcaagacttgccaaagcggagaaaataaggtaaattaataaagtcgcttcgagagatgcgacgagagcttaaaaacagacatgcaaggaaagaaaacaaataaaaagaaaaaagtacttgcaaagaagtaaataagctggtaatatatttaaatgtcgtcaggtgaaagcagaaaaagcttgagtaagacgaaaaaacaaatcaaaaaagttcttgacaaagaaatgatggtttgataaaatataaaagctgtctgctttgcaaaaaaagcaagacagaggtagtactttgaaaactgaacaaagtttcgctaaaagtgtgcgggtgtaaaaacccaaacaagaagcgaagtcaattcgcaagcaataaatttgagacaaagatcttaaataaggaatgagcaatcattcaaactttttaaaatgagagtttgatcctggctcaggacgaacgctggcggcgtgcctaatacatgcaagtcgagcgagcggaactaacagatttacctcggtaatgacgttaggaaagcgagcggcggatgggtgagtaacacgtggggaacctgccccatagtctgggataccacttggaaacaggtgctaataccggataagaaagcagatcgcatgatcagcttttaaaaggcggcgtaagctgtcgctatgggatggccccgcggtgcattagctagttggtaaggtaaaggcttaccaaggcgatgatgcatagccgagttgagagactgatcggccacattgggactgagacacggcccaaactcctacgggaggcagcagtagggaatcttccacaatggacgcaagtctgatggagcaacgccgcgtgagtgaagaaggttttcggatcgtaaagctctgttgttggtgaagaaggatagaggtagtaactggcctttatttgacggtaatcaaccagaaagtcacggctaactacgtgccagcagccgcggtaatacgtaggtggcaagcgttgtccggatttattgggcgtaaagcgagcgcaggcggaagaataagtctgatgtgaaagccctcggcttaaccgaggaactgcatcggaaactgtttttcttgagtgcagaagaggagagtggaactccatgtgtagcggtggaatgcgtagatatatggaagaacaccagtggcgaaggcggctctctggtctgcaactgacgctgaggctcgaaagcatgggtagcgaacaggattagataccctggtagtccatgccgtaaacgatgagtgctaagtgttgggaggtttccgcctctcagtgctgcagctaacgcattaagcactccgcctggggagtacgaccgcaaggttgaaactcaaaggaattgacgggggcccgcacaagcggtggagcatgtggtttaattcgaagcaacgcgaagaaccttaccaggtcttgacatctagtgccatttgtagagatacaaagttcccttcggggacgctaagacaggtggtgcatggctgtcgtcagctcgtgtcgtgagatgttgggttaagtcccgcaacgagcgcaacccttgttattagttgccagcattaagttgggctctctaatgagactgccggtgacaaaccggaggaaggtggggatgacgtcaagtcatcatgccccttatgacctgggctacacacgtgctacaatgggcagtacaacgagaagcgagcctgcgaaggcaagcgaatctctgaaagctgttctcagttcggactgcagtctgcaactcgactgcacgaagctggaatcgctagtaatcgcggatcagcacgccgcggtgaatacgttcccgggccttgtacacaccgcccgtcacaccatgggagtctgcaatgcccaaagccggtggcctaaccttcgggaaggagccgtctaaggcagggcagatgactggggtgaagtcgtaacaaggtagccgtaggagaacctgcggctggatcacctcctttctaaggaagcgaaggatatggagagcaggaatgctaagagaagtatccagagcaagcggaagcacactgagaaactttgtttagttttgagggtagtacctcaaaaagagctagtacattgaaaactgaatataatccaagcaaaaaaccgagacaatcaaagagaacagattgtagagcgaccgagaagagaattcttgagtaaggtcaagtagaaaagggcgcacggtgaatgcctaggcactaacagccgaagaaggacgtgacgaactacgaaaagcttcggggagcggtaagtacgcagtgatccggagatatccgaatgggggaacccaatgcagagatgcattattgattagtgaatagatagctaatcaaaggaagacgcagtgaactgaaacatctaagtagctgcaggaagagaaagaaagatcgatttccttagtagcggcgagcgaagaggaaagagcccaaaccaagtgatttatcatttggggttgtaggactgcgacgtggcagtgtaagagatagttgaattatctgggaaggtaagccagagagggtgagagccccgtaagcgaaatctcaagcacgcctagcagaatcctgagtaggccgggacacgaggaatcccggttgaaaccgcgaggaccatctcgcaaggctaaatactagttagtgaccgatagtgaaccagtaccgtgagggaaaggtgaaaagaaccccggaaggggagtgaaaaagaacctgaaaccgtgtgtctacaagtagtcaaagcacattaaagtgcaatggcgtgccttttgtagaatgaaccggcgagttacgttatctagcgaggttaagtcagaaaagacggagccggagcgaaagcgagtcttaatagggcgaaaagttaggtgacgtagacccgaaaccaagtgacctacccatgaccaggctgaaggtgtggtaaaacgcactggagggccgaacccacgtaagttaaaaattgcggggatgagttgtgggtagcggtgaaattccaaacgaacttggagatagctggttctctccgaaatagctttagggctagcctcgtggagaggataatggaggtagagctctgtttggactaggggcccgtcaggggttactgaatccagataaactacgaattccagatatccatacacgggagtcagactgcgagtgataagatccgtagtcgaaagggaaacagcccagatcaccagttaaggtccccaaatctatgctaagtggaaaaggatgtggagttgcgtagacaactaggacgttggctcagaagcagccatcattcaaagagtgcgtaatagctcactagtcgagtggcgctgcgccgaaaatttaccggggctaagcatagtaccgaaactgtggatgtgttttaaagagcacgtggtaggagagcgttctaagagcggagaagttgaatcgagaggatcaatggagcgcttagaagtgagaatgccggtatgagtagcgaaagataggtgagaatcctatccgccgaaagactaaggtttcctggggcaggctcgtccgcccagggtaagtcgggacctaaggcaaggccgagaggcgtagtcgatggataacaggtagagattcctgtactgtgtcaaatcgttaagagcgaaggagggacgcaggaggtgaagcacgcatcgcgatggaacgatgttcaagcaacaagtgcggttaagagtcaaatgcttctaaccagcaacacgagttgtgaagaggagtgaattaaaagtagcgaaggtgtggtaatcacactgccaagaaaagcttctagccagagatgacatacccgtaccgcaaaccgacacaggtagtcgagtggagaacactaaggtgagcgagagaactctcgttaaggaactcggcaaaatgaccccgtaacttcggaagaaggggtgctagccaagagattggttagccgcagtgaataggcccaaacaactgtttatcaaaaacacaggtctctgcaaaatcgtaagatgacgtatagaggctgacacctgcccggtgctggaaggttaagaggagagcttagcgtaagcgaaggtttgaattgaagccccagtaaacggcggccgtaactataacggtcctaaggtagcgaaattccttgtcgggtaagttccgacctgcacgaaaggtgtaatgatttgggcactgtctcaacgagagactcggtgaaattataatacccgtgaagatgcgggttacccgcgacaggacggaaagaccccatggagcttcactgtagcttgatattgagtatcttttaaacatgtacaggataggtaggagccagagaagataggacgctagtcttattggaggcaatgttgggatactacccttgtttgaaggatgctctaacctcgacctgtaagccaggccagggacagtgtcaggtgggcagtttgactggggcggtcgcctcctaaagtgtaacggaggcgctcaaaggttccctcagaatggttggaaatcattcgcagagtgtaaaggtataagggagcttgactgcgagagagacaactcgagcaggtaggaaactaggacttagtgatctggtggtaccgtatggaagggccatcactcaacggataaaagctaccctggggataacaggcttatctcccccaagagttcacatcgacggggaggtttggcacctcgatgtcggctcgtcgcatcctggggctgaagtcggtcccaagggttgggctgttcgcccattaaagcggcacgcgagctgggttcagaacgtcgtgagacagttcggtccctatccgtcgtgggcgtaggaaatttgagaggagctgtccttagtacgagaggaccgggatggacgcaccgctggtgtaccagttgttccgccaggagcatcgctgggtagctatgtgcggaagggataagcgctgaaagcatctaagtgcgaagcccccctcaagatgagatttcctttgcgtaagcagtaagacacctcagagacgatgaggtagataggctgggagtggaagtcctgtgaaggatggagcggaccagtactaatcagtcgaggacttgaccaaagcgaagcaaactggaaggttttttgcgagaaggattatgtttagttttgagtgtaaaagctcaaaagagtacggtggcgaaagcaagaaggatacacctgttcccatgccgaacacagaagttaagcttcttaacgccgaaagtagttggtgggcaactgcctgcgaggaaaggaagctgccgtgctcttttttaatattccggcttagctcagttggtagagcgcttgactgttaatcaagatgtcgtcagttcgagtctgacagccggagtaaaggggagaaggaagcggaagacttcttttttgtgccttttgggtatgttaaaaggctaattaggctaagcaagcatgacttgagggtcaaatttaatataatcattaatagaagacatagtaaaattcctaacaagcttaattgaattgattacggaggctatgctctctttttaagtgcataaaaatcttatagagagatacgcgtggtgctagttaaatcgttctagacaataagccaaattataagctaaaattgcaatttccaaccggctttgaaagcctatcagactacgtgctcgattgttctcggcattgtaataggtcagaagcgaaaagtcgctttcaattgttctgcgaatagccatcaattgatgatcattgtgctttttagctcctgtcatatttttacgatatggtgtccaaagttcataacccatttgttttagctgttgatgcagttctttgcctaaatagccttcgtcgccaagaagatagtaattagatggatgggtattttccatcagttcaactgtctccctggcatcatgaactgatgcttttgttacgacataatcaagaatgtaaccgtcatcgctaacaatgacatgaactttgaaaccatagaagtaaattttcttggtggccttataaccaatgttggcataaccgcgaaaaattttagcacgatagttgcgaattggttggcaaacaggtaccggaaagctgtcaatgatcaagaactgtccattcaggtcaacctttttattcatttcttgccgtatctgataaatcaattgcaatagctgacgtgaacgtcgattaaaacgtgagtgtgataaacaattgaaacattcacagaatcttctttgtgattcaattcctgtcttagcttgccagataagtaaagccaaaatcagactgtccgtagttttaatttgatcaatatttcgccgatgagtaaactcagccggtgcatacaaacgataccagtgccgacaaattatcactaaatctttaaaactaacttgtaaatggtggctaaaacgcttaagcttaaggcagttcaatcagatcagactcttttctattattactatttacaagttgagtctaacaagattggacttttttattaactaaaacgatttaactagcaccacgcgtagatagattattataaatacgcgtggtgctagttaaatcgttctaggcaatatgccatattataagctaaaatggctatttctagccgctgctgaaaaccagctaagcaaagaaaagtcgctctcaattgttcttctaattgccatcagttgatgatcgttatgctttttagcgcctttcatgtttcttcgatatggtgtccaaaggacatagcccataccttttaactcggcagttaagtcttttcctaagtagccttcatcgcctaaaagataatggttaattggatgagcattaatcatcaattctgtcgtttctttggcatcatgcactgatgctttagttcaagtacatagccatcatcgcttactagcgcgtgaaccttgaagccgtaataatagatttttttagtggctttctagccgatatcagctatgccacgaaagatcttgacgcgatagttgcggataggctgacaaactgggaaactgtcaataattaagaattctccagctgtttttacttcttgattccaatcttgacggatacagcgcattaaaggcaaaagcattcgtgcccgacgattaaagcgagaatgagacaaaccgacaaagaatttacaaaatcttctttgagattcgataccaatttcagtttgccaaataagcatcgctaagatggagctgtcagaaattttaacctgatcaacatttttacggtgcttcaattcatcaggagcacaaagcttgtacaaagaacgacaaattacatttaaccgagcaaagctaacttgtaaatggtgagaaaaacgattaagcttgagatagttcaattagatcggactcttttctatttaatttaagttacaacttgagtctaatccgattggacttttttattaactagcaccacgcgtttataaatattcaacgacagtaaaattaggtaagcaatctatatctaggaatctgttggggttctgattgtagtaggctaattatacaaaaatgagttaacaaaattctgatcagaattagtacggttaagattgaaaaaatagctggtaattattactgtatctctttgtaattaggtagcaatgctattttttacttctaaaatataattaaaccggtcagacaattcgtattgatctgaatttggataaacagttataacaaaactatgtgtgcaaagcagatgacagggacttttaattgatctcgtatgttggagcgcgctgtgttgactatttgttctaagtgaacagatgataagtatgcctctatctaagtaccaagatctaggaaattcattctgaagtagttaatatgtgtcaatatgtcgcacaaaggtaactatgaattacagcaacataagagaaatttgaaaaatagtttttaaattgtggcttgttattagtgaaaatgataaattaaatattattttggcagaaaatacagcttaataacaaaaaataaaaatattttttgcttacctttaaaaatatagttcgagatttataaagtttttaacgagttaaagtgatatttctataattgaaagcagattctactaatgtaattactataatcagaataaatatttcataaaaatacatagaacccgaacgaagagcaagacttgccaaagcggagaaaataaggtaaattaataaagtcgcttcgagagatgcgacgagagcttaaaaacagacatgcaaggaaagaaaacaaataaaaagaaaaaagtacttgcaaagaagtaaataagctggtaatatatttaaatgtcgtcaggtgaaagcagaaaaagcttgagtaagacgaaaaaacaaatcaaaaaagttcttgacaaagaaatgatggtttgataaaatataaaagctgtctgctttgcaaaaaaagcaagacagaggtagtactttgaaaactgaacaaagtttcgctaaaagtgtgcgggtgtaaaaacccaaacaagaagcgaagtcaattcgcaagcaataaatttgagacaaagatcttaaataaggaatgagcaatcattcaaactttttaaaatgagagtttgatcctggctcaggacgaacgctggcggcgtgcctaatacatgcaagtcgagcgagcggaactaacagatttacctcggtaatgacgttaggaaagcgagcggcggatgggtgagtaacacgtggggaacctgccccatagtctgggataccacttggaaacaggtgctaataccggataagaaagcagatcgcatgatcagcttttaaaaggcggcgtaagctgtcgctatgggatggccccgcggtgcattagctagttggtaaggtaaaggcttaccaaggcgatgatgcatagccgagttgagagactgatcggccacattgggactgagacacggcccaaactcctacgggaggcagcagtagggaatcttccacaatggacgcaagtctgatggagcaacgccgcgtgagtgaagaaggttttcggatcgtaaagctctgttgttggtgaagaaggatagaggtagtaactggcctttatttgacggtaatcaaccagaaagtcacggctaactacgtgccagcagccgcggtaatacgtaggtggcaagcgttgtccggatttattgggcgtaaagcgagcgcaggcggaagaataagtctgatgtgaaagccctcggcttaaccgaggaactgcatcggaaactgtttttcttgagtgcagaagaggagagtggaactccatgtgtagcggtggaatgcgtagatatatggaagaacaccagtggcgaaggcggctctctggtctgcaactgacgctgaggctcgaaagcatgggtagcgaacaggattagataccctggtagtccatgccgtaaacgatgagtgctaagtgttgggaggtttccgcctctcagtgctgcagctaacgcattaagcactccgcctggggagtacgaccgcaaggttgaaactcaaaggaattgacgggggcccgcacaagcggtggagcatgtggtttaattcgaagcaacgcgaagaaccttaccaggtcttgacatctagtgccatttgtagagatacaaagttcccttcggggacgctaagacaggtggtgcatggctgtcgtcagctcgtgtcgtgagatgttgggttaagtcccgcaacgagcgcaacccttgttattagttgccagcattaagttgggctctctaatgagactgccggtgacaaaccggaggaaggtggggatgacgtcaagtcatcatgccccttatgacctgggctacacacgtgctacaatgggcagtacaacgagaagcgagcctgcgaaggcaagcgaatctctgaaagctgttctcagttcggactgcagtctgcaactcgactgcacgaagctggaatcgctagtaatcgcggatcagcacgccgcggtgaatacgttcccgggccttgtacacaccgcccgtcacaccatgggagtctgcaatgcccaaagccggtggcctaaccttcgggaaggagccgtctaaggcagggcagatgactggggtgaagtcgtaacaaggtagccgtaggagaacctgcggctggatcacctcctttctaaggaagcgaaggatatggagagcaggaatgctaagagaagtatccagagcaagcggaagcacactgagaaactttgtttagttttgagggtagtacctcaaagatttgaaaaacgccaagcgttagtcgggcctatagctcagctggtttagagcgcacgcctgataagcgtgaggtcgatggttcaagtccatttaggcccattgacataacgaagaaaaagagttaaagttatgtctggccgaaaataaaatactctgggggcttagctcagttgggagagcacctgctttgcacgcaggaggtcatcggttcgaacccgttagcctccattgatccagaaaaaggatcaaagagctagtacattgaaaactgaatataatccaagcaaaaaaccgagacaatcaaagagaacagattgtagagcgaccgagaagagaattcttgagtaaggtcaagtagaaaagggcgcacggtgaatgcctaggcactaacagccgaagaaggacgtgacgaactacgaaaagcttcggggagcggtaagtacgcagtgatccggagatatccgaatgggggaacccaatgcagagatgcattattgattagtgaatagatagctaatcaaaggaagacgcagtgaactgaaacatctaagtagctgcaggaagagaaagaaagatcgatttccttagtagcggcgagcgaagaggaaagagcccaaaccaagtgatttatcatttggggttgtaggactgcgacgtggcagtgtaagagatagttgaattatctgggaaggtaagccagagagggtgagagccccgtaagcgaaatctcaagcacgcctagcagaatcctgagtaggccgggacacgaggaatcccggttgaaaccgcgaggaccatctcgcaaggctaaatactagttagtgaccgatagtgaaccagtaccgtgagggaaaggtgaaaagaaccccggaaggggagtgaaaaagaacctgaaaccgtgtgtctacaagtagtcaaagcacattaaagtgcaatggcgtgccttttgtagaatgaaccggcgagttacgttatctagcgaggttaagtcagaaaagacggagccggagcgaaagcgagtcttaatagggcgaaaagttaggtgacgtagacccgaaaccaagtgacctacccatgaccaggctgaaggtgtggtaaaacgcactggagggccgaacccacgtaagttaaaaattgcggggatgagttgtgggtagcggtgaaattccaaacgaacttggagatagctggttctctccgaaatagctttagggctagcctcgtggagaggataatggaggtagagctctgtttggactaggggcccgtcaggggttactgaatccagataaactacgaattccagatatccatacacgggagtcagactgcgagtgataagatccgtagtcgaaagggaaacagcccagatcaccagttaaggtccccaaatctatgctaagtggaaaaggatgtggagttgcgtagacaactaggacgttggctcagaagcagccatcattcaaagagtgcgtaatagctcactagtcgagtggcgctgcgccgaaaatttaccggggctaagcatagtaccgaaactgtggatgtgttttaaagagcacgtggtaggagagcgttctaagagcggagaagttgaatcgagaggatcaatggagcgcttagaagtgagaatgccggtatgagtagcgaaagataggtgagaatcctatccgccgaaagactaaggtttcctggggcaggctcgtccgcccagggtaagtcgggacctaaggcaaggccgagaggcgtagtcgatggataacaggtagagattcctgtactgtgtcaaatcgttaagagcgaaggagggacgcaggaggtgaagcacgcatcgcgatggaacgatgttcaagcaacaagtgcggttaagagtcaaatgcttctaaccagcaacacgagttgtgaagaggagtgaattaaaagtagcgaaggtgtggtaatcacactgccaagaaaagcttctagccagagatgacatacccgtaccgcaaaccgacacaggtagtcgagtggagaacactaaggtgagcgagagaactctcgttaaggaactcggcaaaatgaccccgtaacttcggaagaaggggtgctagccaagagattggttagccgcagtgaataggcccaaacaactgtttatcaaaaacacaggtctctgcaaaatcgtaagatgacgtatagaggctgacacctgcccggtgctggaaggttaagaggagagcttagcgtaagcgaaggtttgaattgaagccccagtaaacggcggccgtaactataacggtcctaaggtagcgaaattccttgtcgggtaagttccgacctgcacgaaaggtgtaatgatttgggcactgtctcaacgagagactcggtgaaattataatacccgtgaagatgcgggttacccgcgacaggacggaaagaccccatggagcttcactgtagcttgatattgagtatcttttaaacatgtacaggataggtaggagccagagaagataggacgctagtcttattggaggcaatgttgggatactacccttgtttgaaggatgctctaacctcgacctgtaagccaggccagggacagtgtcaggtgggcagtttgactggggcggtcgcctcctaaagtgtaacggaggcgctcaaaggttccctcagaatggttggaaatcattcgcagagtgtaaaggtataagggagcttgactgcgagagagacaactcgagcaggtaggaaactaggacttagtgatctggtggtaccgtatggaagggccatcactcaacggataaaagctaccctggggataacaggcttatctcccccaagagttcacatcgacggggaggtttggcacctcgatgtcggctcgtcgcatcctggggctgaagtcggtcccaagggttgggctgttcgcccattaaagcggcacgcgagctgggttcagaacgtcgtgagacagttcggtccctatccgtcgtgggcgtaggaaatttgagaggagctgtccttagtacgagaggaccgggatggacgcaccgctggtgtaccagttgttccgccaggagcatcgctgggtagctatgtgcggaagggataagcgctgaaagcatctaagtgcgaagcccccctcaagatgagatttcctttgcgtaagcagtaagacacctcagagacgatgaggtagataggctgggagtggaagtcctgtgaaggatggagcggaccagtactaatcagtcgaggacttgaccaaagcgaagcaaactggaaggttttttgcgagaaggattatgtttagttttgagtgtaaaagctcaaaagagtacggtggcgaaagcaagaaggatacacctgttcccatgccgaacacagaagttaagcttcttaacgccgaaagtagttggtgggcaactgcctgcgaggaaaggaagctgccgtgctcttttttaatattccggcttagctcagttggtagagcgcttgactgttaatcaagatgtcgtcagttcgagtctgacagccggagctagcggaatatgaaagaggcgggggccagaggcttccgcctttttgtgtgctattaaagttctataattaagcttttctaagtcttgaaatttttttaaatagggtttccaaggaactttgaggagtttgtactctgaatggtattgatggatacgttattttttctgccggaaagccacagaatggacaagtgggctgctttaaaagggcttcgtagactttgtattgcactccattgaagaatttatagaaattgttgtaaaaaacgatatttttatctttaatatcgagatcaaatttaatacaatcattaacagaggacatagcacaactcctaaatagcttaattgagacagaatatcataaatattcatcaacaggaaaaattatagagctaataaagaagttatagctttttatttgcgttatgaaatgtataaacttgttgtctttgtctctctattagactggtaaatattcaaaagtatatgttaaatttcagacattaaatacttagaaaaaaggacatatttagatggataaaaattctgatagacttacgttagtgccatatttcccgaatgaaaagcagactcttaaatggtaccaggatcctaaaatctgtaagcaggtagataatattgataccgtttatgatttaactaaattacgtcgaatgtatgaatatttgtcagtgcatgggtggtgctactatattcaatatcaagggaaattgattggtgattgtactttgctaaaagacggtgagatatcaatcgtgatttgcaaagaatatcaaaacttgcatcttggtagaaaatgtgtcgacaaattggtgcagcttgcaagaattcagaaaatgacgcaagtgaaggctcacatatatgactttaatattcaaagcaaaaaaatgtttacaagaatggggtttaaagagcaacaacctgactggtactcttatgatttatagatcaaaaatattcatgttaccaagtaattcatacaaacaatcagttggtgtgatgtcagataagcactcgtattagaaaaatgtaatcatcagtaattaaagactgtagttgaatcaaataattaactcagcgtataaaatgctgagttagacaaaaaaacaacgagcaattctctcgttgttttatggattcattttgatcaaatttttagtttatctttagttgtaaataccaacttgattaatgtgggccaattccagaactggagattgagcgaggtccaaactaacatcacagccagcatggataccattattttcgccattaagccagtgggtattattagttacgtcatagacagtaccattaaatgcaatataagctggacgtccatttttaccattgtaatttgatagagtttctttagtaaattttctcatataagaagctcctttctaataagatcttgatatattaatggtaacactttgtcaccttatagcaagagatacgaaggagtcttatgcttttcttatgaaagatgaccacgccacccagcaatatcccaatctagaaagtcataattaagctttttaccataaattttctcgtaggcagcaactttttgtcggtagtcgagttccatcatcttatgagcgttttcgttggcgtttagagaaacgtcagggaagattggtggtaaaacatggacaatatatttggtctcataaaaattaggatctttcttttcgattttaggtagatccttaatctcgacaaaagtggagactaccggtacattttgtttagccgcaaaataataggcaccacgttgtaatttgcgaggcttgcgataattccaccacatctcctgttctggataaattaaaacccaattatttttagctaaagctgcactgaggtgcttaggaaattcatttccaatatagctaggactctgaactagtggaatagtgccaacataattcattaaatagcggaaaaatcccggtagcattaggttagtatcttcaattacaattgaaagctgatggtgcatcttgttagcgagcagcttcattggtaaagaatcaacctgattgtagtggttagaagttaaaattgcgccaccaataggtaaattatttaggttctctaaacctacaaattcagttgatccagctaatgctctggataaagtaccaaataagagatgtccaatacgattattaagcttacttgaaaaagtgttacgcttattccaataatcattgaccaatttaaggcgctgatctagggacatttggggatcgccgatttctacttttgctgtgaagttacgttcattagcagctttttttatatttttaatcactgcctcacgattatcgccaaaaatcatagtgttactgcctctcgtttcttaacttttgcccaattattaggatcttgctcagttttgtcttccttagcaagcatatgatccaatttttcgcggtctgctgcacgctcgtcatcagtataattattgagttcgttctttaattcatcgaaaaactgcgtttgtttggcactatcccagaagtactgtgcatattggacattagcaaaatgccatggcttaaagaaaagattatagtgaatcagaccaggattagttaaaggttcagtgttttcatttggcatagcatcccagcgaggatttaagtgcaaaattctgccttccccgatttcatttaaatagtcttgatcaggagcaatacaatcaaaatgatacttttctaaaagtgtcataaaatggtcaataaaatgttcagcgcgaaaggccctagcattcatgacgagcatgccagagttaatgtatttcttggggtcaagtgccaggacatttttgatgtattttatcatcttgtctacatattgaattgaggagtcggtgcaagcagcaaataaattatcacccaattcggagttgtatagtttagcaagatcgtcgtttacaattgtgtcgctatcaatatagatcaccttatcatattcgggaaaaagttctggaataaagaggcgataaaaaatcgacatggtaaaaaagtcagcgcgaagaaagttttccttacgattttgaataggttgtacaagttgatcatcaatatggaaaaacttcacatgaacgtttgaactgctaagatcagacaaagctttttgatgctttgatgagagatcttgatttaaaaagtaaacagtataatccttatttggatctgtatgtttgactaaagaattaagagaaacagcagcgtatttggtaaagtcatcgctgatactgtaaaaaataggaattgtcataaaattacctttcttagattttaactgattccgtttgtttaaccttagcccaggtatttggctctttgacaatcatgtcaacttttttggccatccattctaggttagctcgggccttttgacggtcttcatcagtaaagttgtctaattgctgctttagttcatcgtaatacggcgtagttttagcaacataccagaaataatgaccatattgaacatcagcaaaatgccatggtttgaagaaaagattgtagtgcacgatcttaggatcttgaatttcaggaatgctttcatttggcatagcatcccattctttaggtaggtgataaatcttatcttcgcaaatttcattcatgtaggcttgatcagggtcaacgttatcgaaatgatatttattcattaagtaatagaatttatcaacaaactttttgtctctaaaggccttcatattaaacagaattacaccattattgatgtatttttctgcaggaaaaattccctgacattctttaatgtacttttgtaaaagtggcatgtaacgaattgataagtcgggacatgaagcaaacatgttgtcggcgatatcaatttcatacattttagcaatatcagtacagataatagtatctgcatcaagataaactgccttgtcatattgagggaacaattctggaatgaatagtcggtaaaaaattgacatagtaaagaattgagcacgcaagtagttttccttagtattgtgaattggcttaaccatgtcatcgtcaatatgaaagatttgaacatgaatattatcagttgaaagatcttctaagctctttttgtgctcatcagatatctgttggactaaaagggtaatcgtatagtccttcttggggtcagtatggtcaattaatgatttaattgaaacatatgcatatggcgtataattatcgctaattgtgtaaaaaacaggaatggttttcaaaataagatcctcctaaattatttttttaaattatttcgtaatttgagatattcgttaagcaaatcatcatattcatgtaaatgaagtacactgtgtacgcgatcaacatcccatggcttaactgtttgagtatggaaataaggccaaaacctaaagctagtagtgaaatgttgaattttggtgtttttttgcaaatgatattgctcattataacggcgtggtgctactcgcttggctacagctagcttgtttattgctgattggtcgggcaaaaacatttgcttaacctgcatcatatgccgcacctcggcaaagagatcagtttgcttaattttcttcatattcagcaacaaaacgccagaattaagataatcaaatgcgcgcttggtcttaagattgtggaagaagaagcggccccaataatcaagtacgcccactaattcgattccggtaatatcctcattgtaaaaagttgtaatatcaccgcgaatgacaatgtcatcgtctaaataaagaatgcgatcaggaatctgtggcaattggtctgcaaataaacgcaacatagcatatggcgtgaagcgagtattcatgttagcggttggcggttcctgttcaaataacttggtgcagtcaattaattcaactgtactgttaggattggctttttttactaaagaacgtaaaaaatcagccgcatgttgtgagaaagggtgatatttacgttcatcactgtgtgcctccatcgttaaaatataaagatgcaattcttgagcaccagaatttttgattaaagataaggtggaaatcaaaacgccatcttgagcattttcatctccacaaaaaagaatattcatgataaactcctattttttatttcttttgaatatattgacaatattcataatcgctattttttgcacgctgcttcattacctgccaaatttcatcgtgaagcttattttgagcttccttacggcttaaatttgtatccgggtaaaagggcccatcaatgtaaataacggcactaggccgcttgctaagccactttttatggtaggttttggtcatgacgaaactaggcgcatttaatttaactggaaagtgcatgcttgttgcatcgaacgggcgaatcttcgtgtaatagggccagacatgagcttcagggtagatgagaatctcgccctttttatccttaatcacagtttgaatggctttaattagtttgagcgattgcttcatatttttgccaacaggcagaccgccgtagcgtacaagatatttgccaatgaaggggatgccccagttagcttgattagcaatagcataaaaatttttgattggaaaaattgtgagcgaggtaaagacatcccccatgggtctagtatggttgccataaataaaatagcccccattgacttgcttaagtttttcttgaccaacgacttttacatgatcgaagaagcggaaaaccacccaaccaaaagcgcatgctaagtgacaagcggtagtggaccagattctagctccaagagaattaggtagaataacgtaattatcgggtagactgaaattttgatcgtgactatcgactacatcatcggttgttttttggtaataataaatccgtttcatcttgccctccatgatacttatgtatcctatgataccatggaaaaaagcctaattcctaagacgagaggaatgctgaaagaaaataaaaaagattcgtaatttcatgatcgaaaaatacgaatcctctgtaaaatagcataaaaaaagcaccgccttcttgcagtgcatctttcatattatgggtggccaggggatcgaaccctggacccacggattaagagtccgttgctctgccagctgagctagccacccatatttgttcatcagctcccgccgacatttaaatatattaccagtagttttataatttgacaagctttttttgaaaaaagttgaaaaataatttgaagctagcaaaaagcgcccataatggccgcttttttactaaagtttatcttgaatatgataggctgtgccttgctgatcctgcttcatgtgatctgcatagtaaacagcatagacaccgctttgatcatttttggcaatcacaatttggcgccctgttggacgttctgccttaatgatttgagcactgcggcgtgcttctttaaagtcgtgtgaagatgcgatggcatcccctggattaaaaaatacagcttcgttcattgtaaagccccctcgtacaaattctaattttattttaccaataaagccctttctaaatccaatttaagaaacaaaaaagagataagatcaacatcttatctcttacgaaaaatattatgggtggccaggggatcgaaccctggacccacggattaagagtccgttgctctgccagctgagctagccacccatgtcgttgaatcaatcaacagatattattatgctattgttgataagaaaatgcaagctttttttgaaaaaaaacaaaaatttttggctaatgttacaaaattcagtataatgtaagggcaaaggaggcattcccgatgccaaagaagattctcgtcgtcgacgatgaaaagccgatttctgatattatcaaatttaatttaactaaggaaggctttgatgtcgacaccgcctatgatggcgaagaagctgttaaaaaagttgacgaatacgacccggatctaatgattctggatttgatgttgcccaaaaaagatgggttggaagttgcgcgtgaagttcgtcaaacgcatgacatgccaattatcatggtaactgctaaagatactgaaattgataaagtcttaggactggaaatgggtgcagatgactacgtaaccaagccgttttctaaccgggaattagttgcccgtgtgaaggctaacctgcgtcgtcgtgatattgttaaaaaagcagaagctgccagccaagaagagaccgataagaatattaagatcggtaacttggtcattatgccagatgcctatattgtagaaaaaaatggtaagaagattgaacttactcaccgtgaatttgaacttctttactatttagctcaacatatgggacaagttatgactcgtgaacacctgcttcagactgtttggggttatgactacttcggtgatgtgcggactgtagacgtaacggtgcaccgtttaagagaaaagattgaagataatccaatccaacctcaaattttagttacccgtcgtggtgttggctattatgtaaaacagccgagtgaagaataataaagaaagccacagaactgttatgcaatgtcattaagttaagacattgacaattaatattagacttttaaagcactgatttaacatttaattggttaaattggtgcttttttcgtacaacaaataaggcatagcacagattctgcttttttaagctacgcgatataaataatatacagctgatttgggcttaatatttctcttgtccttgcggcctggtctaattggaatggtataatagctgatctgaataaggatccgttcaaaatcttgcgttaaagaagaagccaaatacatgctctgaataatcaagcatgattgcttgaaattgatggcatattgatacttgcaatgcttttgcggaatataggcctgtgcatcaatttgactgattgcattaaacataatcatatgggcataaatttccatttcaataaatttatcttgtttggaatggaactgtacactgcctaaagaatacttcaatttcttgaaggaggtctcaataccccaacgcagatgataaagctctttaattctttttagcggataattttttcgatcaagattggttagcacaacttcccattcttctttgcctgatttggcatcattaattctaaatttgcaggctcgaaattttattgtgcataactcgccaaaatcccagcttagatcctgggtatttttagagcgatacttaatatattggcgataatgatgctggacatggtgaatattctcactggctttatgcgtgatgtagtaatagttagaagtagttaccaggcaggaaatctcacgatcacattcttgatcaggcaatgtcgttatttctttaactccgccttgtccagccttagttcgtattatgtaatgacagttaggcaggcgattgcagttttcaatcatattgaaactagtgtagccacgatccattgttacaatatatggaccacaattcaaagctttaagcatttgaacagccgctttgcgttcatccatttctgatttaggctgaaaaatacaatcctggtaggtattattcaatagatcatataaggcattaacgtgaatttgacaatagggtttctttttatgagaagaagcttgtacaatgttattcgatttcggattccagatttgattaaagtcagagccatcaatggcaaacaaacggtagtgatgatcaaaaagttgaatattaaatagattttgattaaaaacagtcagaatatgtttaaaacaagcaggagaaagctggcttttgcgttgaacataggcagaagtactaactactttatcgttctttttagttgcatcttcgccaaaagctctaaagagttcactgtttaaattctgaccttgcatgttaattgtagttttaaggactgtcgctgcatctaaagtgcgtttcctggtaaaagcatgaggattattaataaaatcgtgaatatgatccccagtattattgataatttgatcaagacgttctagaatattcttatgaagggctttcataattaacaccatctttctggcaataattttgaaggtttaaaatatataatatataagataggcgaaaaggctggtcttttcgcctttattttatacaaaaaaagagatcgaatccaaatgattcgatctctaaaaaagcacccttaattgtcaatgtcttaacttaatgacattgactgttatggtagtggctttcttttttatattttttagatattgaatgagtagaatgaaaaaattcaaagcaagattaaatagtacatttaattccattaatactaaaattgcaattgtgttcatgctgatgctactggcaacaattgaagttattggagcttattttacccgtcaattagagcaaaatagcattgaaaatttccaatcatcaatccagattcagactatcgtcagcaatcagttagctaatcagttgaccagtgataataaaaatactaatgatcgcttgaatcaaattgttaatgactacaataatgatgcaattagtgaaattattgttgtcgataataaggatacgattcgtgccgtttctaacttaaatgataaaagtaagatcggtcaacggattaacaatactgatgtgaagcaggttatttcaactggacatcaaattaataaagtggtcgatgatcatggcaattacatgattcaaatatcgccgttgactagtggcaatggctctaacaatactgttggtgctgtctatgttaaagctagtatgcaagatgtctttaacaatttgcgccaaatttcattgactttcttgattgcgtcattgatcgcggctttattaggtgcatttttgtcattagttatttcccgggcaattacgcaaccgatcgaagaaatgcagaaacaagcattgcatattgctgatggtgattattcaagtcaggtaaaaatttattccaatgatgaactagggcaattagctaaagcatttaataccctgtccgtacgaattgaacgctcacaagaagagtctgatagtgaacggcggcgactagatagtgttctgtcacacatgagcgatggagttctagccactgatcgtcatggtaacgtcagtgtggttaatcatatggcactaaactttttaaataaaaaagaagacgaggttatcaataagccgattgctgaagtactgggactagaagatacttcgtcacaagatttgatttctagtcaaaaagagatcgttattacccttgatccaggtacgcgggatgaaattattttgcatgctagtttttctttgattaagcgggtaactggctttgtatcagggtcagtttgtgtattacacgatgtaactgagcaacaaaagaatgaagattcacaaagacagtttgtttctaatgtctcacacgaattgagaacacctttaacaagtttgcaggcttatattgaagctcttaatgagggtgcttggaagaatccagagattgctcctaagtttttggaagttacccaacaagaaactagtcggatgattagaatgatcaatgacttgttgagtttgtctagaatggaccgtggcgtttcaaaaatggatctagaatttgttaacttaaacgattttgttaaccatattcttaaccgtttcgatatgattgttaaaacagataaaaataaagaaaagaagaaatacacaattaagcgtgaattaggcagtcaagccttatgggtggaaatcgataccgataagatgatgcaggtaattgataacattatgaacaatgcaattaagtattcacctgatggcggtgtaattactgttagaatgacccaaaaccaaaatcatgttatcttaagtatttctgaccagggcttgggtattccaagaaaagatctgggtaaaatctttgaccgcttttaccgagttgataaggcacgttcccgggcccaaggtggtaccggcttgggcttggccattgctaaagaaattgtggaagctcaccatggtaaaatttgggctgacagtagcgaaggcaaggggtctactttctatatttccttgccatatgaaccgatgacagaggaggatgattgggatgaagtttaaattcaaattcggtgaatttttcttaggcttagctacactgatcgtcattgtcctctcaattgtgctttggatctttattatgactagtgatcagcgctttagtaatattggtcagcaaaatcaaaataatatcactaaagagcaaacgcgtagtcacaattttaagtcattatatgatttatatattccaactacttcatatggttttgctaatggaaatttgtgtcagctatatgattcaaaaaataatttgactttagaatttaccaaagagataaaaaaagccaaggccactaataaaattaagaaaatagttgatactagaactaaatatgaagagtatttaaacaatcccaactatgtgcagttggtttatccagatgaaattactttctccttatttaaccagttgaataatgccgcaaatgataaccgcgagtttaaccgcttctttatctcgcagtcaaatcactggatttatttgggaaatgatcagactaatgaaatttatcaagtaaaaattgctggcgcaaattttgataaactacgtaaatatgcatgtaatgctaagagcaagtatccagttagattagttcgtttaaaggaaggctattcaccgttttacatcaagacaatgaatgctaaagtttatagttacttgactaatcatcaatcgtattcttactttgtttcgcgtttattaggtacatctggcgttactagtaagactaataagaatggtcaaacggtatattctttgaactactatactcgcttaagagtgccagattctaattcaggtgagcataattatctttatactcattatgaaaaaaataagatccccaatactactaaccgcttattagatagcgtttattatgttcaccaattgggtttaaccgagcaagatttacgcttctttgatgcagatggtgctaatgttagttatctaaactatattgaagggattcctgttttcttaaataagcatgatttgcaagtcaagacgaccttttcaacagattcgattaatgtggcctttaatagtgtaaacttccaaattccaattccgtttgatggtcaaactaagcggttaaaaccaacccaagatgttgttgatgaattagtcaatcacggcctaaagcaggaagatattcaacgaattatcgttggttttgctgaagaaaaggattcaagtcaccatagtttgattaacttgatcccaacgtactatatcaaagcctacgatgaatggaagagcctaggtgaatgggaaaagcaagacgtatctacctaccgtgaagctgatcagttaactgttaacgaagggggaaaatagaaatggaccataaacgaatcgaatggctatttttcgttgttttctttttaattgatatttatcttggaatcgaaattctccgttctcccgttaatttaagtaacgctgataccactactcgtagtgttgctagcatccgcaatgaaatgaagtcagacaatattgatttgcccgataagatttcggatgcaccagattctggttattatttagctaccaagaatcgtgactatctctctggcaaagttagctcgctgactaatgtaaatgcccgctattctaaaagcgataatgtgctttatggtgaaccaagacaagcagtccttttgagtaaaaaacctaaggaagctttagaacaaattgaagattttaagaatgattcgaaaaatattccttatggtaaagaattcaagtatgaacctgatatgtcgagtgaagacaattatgtttttgtgcaaaactcagattatggtgaaatttatgctaactcggcccaattgaatatcaatgtaaaagataatcagattattaattttactgaaacatatatggggcaagctagtccagtgcgtgaattacagtcaaccatcagtgcttggcgtgctgtgcgtgcgatgtacactgatcgtgagttgactaataattcgcgcgtaacgcaggtaaaattaggttactccaaactgacagaagtacgtggcagcacaatcttgttgccaacttggctggtttgggtagaaaataagacaactaaaaatatcacgatgaaacgtattaatgcatatacggcacagatgctacaatcgagtacctataatgtagaaaagtagaagggacaaaaattgaaggtttccgttttagcaagcggctcgaccggcaataccagtttaatcgttacaggccagcataaaatcctgatggatgctggcatttctggtaagaaaactaaagatttgctagccgaagttggagttgatattaacgagattgatatggcctttttaagtcatgatcataccgatcatagtggcggactcggcgtgttgatgcgccgttatcctaagatagatgcttttgccaatagtgggacttggcagtatttattggatacgaaaaaaataggtaaattaccggctgaacaaatgaatacaattgaaccaggccaaactaaaacttttggtgatgttgatattactgcctttgcaactagtcatgacgcagctgagccgcaatattatgtgtttactagtggtggtaagcgggtcgcttttttaactgatacaggttatgtatcagaagaagttgaagggacaattgaagatgctgatgcctatatgatggaatttaattatgataatatgatgctcagagatggaccatattcctgggcactgaagcagcgaattttgtcggatgtaggccatttatctaatgacgaagcagcccaggcattagttgatgtagtcacacctaaaacaaagcatatctttttagcgcatcgcagccaacataataatacggagtatttagctcacgaaacggcaaaggaaatgctgcttgagggggatgcgaatttggatgatgatgttaagattattgatacagaacctaatcagcctacaaaattagttgaaatttagcagttttcacaacattttttcatataatattcaaatttaatcggtatgattagtaaacaagatgaggggagaagcaagcatggtagaaaatcaaaataataataacaatttacaacaacctagaaaaaagaatactaatggtaaaatcattgccactgcagcgattgtcggtgtagttggtggcttgatcggtggaggcgtttcatattacgcagctgatcaaatgaataatgcatcagttaataatggtgccgctcaaactagtgtatcttcaagtagtagtaaagtttcagaaaagagtgctaagactagtggcacaatgactactgcatataatgatgtaaaaggagcggttgtttcagttattaacttaaaacgccaatcaagttctaatagtactaattcactttataatagtttattcggtaatgatgacagtgatgatagctattcatcaagcagcaagggcaagcttgagacttacagtgaaggctcaggtgtagtctacatgaaatctaatggcaagggctatatcgttactaacaaccacgttatctcaggcagtgatgctgttcaggtaatgctagctaatggcaagacagtaaatgctaaagttgttggtaaggatagtacaactgacttagctgtgctttcaattgatgctaagtatgtgactaagacggccgaatttggcgattctaagagcttacaagctggtcaaactgtcattgccgttggttcaccattaggtagtgaatatgcttctacggtaacgcaagggattatttcagcaccggctagaaccatttctacttcatcaggcaatcaacaaacggttattcaaactgatgccgcaattaacccaggtaactcaggtggtgccttggttaactcagctggtcaagtgatcgggattaactcaatgaagttagcccaatcaagtgatggtacttctgtcgaaggaatgggctttgcaattccatcaaacgaagtagttacgattgtgaacgaattagttaagaagggtaagattacccgtccacaacttggcgtaagggtaatcgcacttcaaggtattccagaaggctacagaagccgcttgaagataaattctactttgaagagtggtatttacattgcctcagtaaacaagaatagttcagctgctaatgccggaatgaagagcggcgacgttattaccaaggttgacggcaagaagattgatgatgtggcatcgttacacagcattttatacagccataaagtcggtgataccgtaaatgttaccgtgaacagaaatggtaaggatgtcaacttaaaggtaaaacttgagggtaactaaaaatcaaaatagaagttaattaaaagaaaaaaggctatatcacgcggtttaaacgtagatatagcctttttgttaactttttaaatgtgtaacatcaaattgttcggaattatttgttgtcaaacagacactagcctgttgataagtgtggataactctgtggattgtgtataacttgataaatataggtttattaacttgtggaaaaatatgatgattttgaccttatttagtgaattctatttgagaaaacaggcgttcatgcaggcataacaagccttaagagataaagtttgtgaaaaaaggctttcataaaatcgatgtgaataaagaaattttagaaaaattattaaatacaacttctggggtataagtaaaataataccacaaaatgttgaaattggtctttgaagttttgtggaaaagtttgggtaaatagtgtggaagggatgttagtattgtgctggtagattaaaattatgaatggaaaattagctatgcttgttataatagaagcatgaatatcaaaattgtatgtgttggaaaattaaaagagaagtattttagggatgcaattgcggagtatgagaaacgactcagtcgttttgcaaaggtgtccattgtacaggtgcctgatgaaaaagcaccggaaaaattcagtgcagctgaagatgagaaggttaaagagattgaaggtcagcgaatcctgagcaaaattaaagataaggagtacgtgtatgtgactgcaattaaaggaaagcagcgcagcagcgaagagttcgctaaagagattcaggatctcgcaacttatggtcattcagacattacgtttgtcattggtggcagtttagggactagcgatgctgtaaacaagaggggaaatgacttgattagttttggtaaattgacgatgccacaccagttgatgcgcgtggtgttgattgaacaaatctatcgtgcatttatgattaactcaggtagtccttatcataagtagaatatagaaaaagcccataaattgggctttttatttttgcatatttgcagatttcacaagcatattgaaaaaaactgtggcaggtcagtgcttttttagttttttatgatttaaaaatagattttgttaaattatgtttggcaacaaaaaagacgatctttcgatcgccctgataatttttgagctaccagctagtagctcacgcacacgctgaagtgtactttatctttgtagtatctcaattttaacacataaatggtaaaattaaaactgcacgctgaagggggtaagtgtcaatgtttttgcggtagcctttaaaccattagtctaaccttaatttcttaaatatttatatgacttaaatttctgcttagcttgcttaaataactattgccagctacctgtgcggttaatgcgccatgctggatgcctaaatgaacttcatgacgcttctttaagctgtcacgggccgctgcttttaattcctgttcagtcaatacagttatttctgaatcttcaaactcgctgctaagccaaaattccagctctcgattcttgatgcagcttaagatcctaagcatgccttctgctccagattttgaccatttcttgccttgccccttaacacggtaggtatacttgcggtggttgctctcgcagcagccaatggctttagtcacagtcagttttcgtttcttaaacggcttaatatcgtcccaatgacgatcaatataattccttaggcgccccagataatcatgattgagctcggtattcaattcatcaattagtcggctttctgcagtggttaggatagttttaactttgtcatagctgtatttgtattccaaagcagaaatcagcttgccttgcaggtcaggcgcaaaatatagcctttctttgattttcttatttaggtgaaagacatccaagaaatgctcatgacgcttgcatagccctacaatgtcatcgaagtctgttttggcatatccagcaccgccatcggcgttgctaagaattacagtatcagaaagatcataagtattggccaggtactccttggcttcgttcagcgcatcaagtcggcttaaagaaacaaattccttggcattgattcgctttctgcgtttcttgcttatattgacaatgccttcacagacctgatagcgatgaaattccaaccggcttttagtgcctttgatcaccacgccatcgccttcaagatacaaaactgggacctttttcttagtgcctgcggcatcatatcttgaatctgcttcttggcccgctttaatatttttcccggccatttttaccaaattgcccacctgcatatggctaatattaaagccagacaggcaattgactgctagagcagtattgcgataagtggcaacgctgcttacttctaagatgtttttgactgctaaaatactgtagcgcttgtatttgtcaaagcccattaattcatccaagggataccttgcttgtttgcctgggcagacatatcttcttctgacatacctaacttcgccaaaagccatattgattgagcgctcattcttcttatcaatctgatagccctgtgctttaaccttggtaatcatttcatcatcaactttagctaaagccaaggccatgatttccttaatcaggtttaagaagaaacagattatttttctttcacgcttaatataattatcttcagactttataatatttgcgatttcagttacaattgaattcataaaagaccagcttctaatgtgttttttgttcttaacatcagactactggtctttttgtttgagctcaagtccaaattcaaaggacttgggcttttttaattatttattcaacttaccgtaaaaaattatacacttagctgaaggggtagcgcccttactcgtgtggaaggaggtagactcaatacagccgtccttcggggcggctttttttatgatgaaaatggcaagtcattgggtgaaaagtattacgcatatcgtgcagtaactgtaaatcaaagtcccataacaattaatggcgctaaattctacaagttggctgatagggatgcttatattaaggtgaccaatattagtggtcaaggtcgcgttttaaagcgtaacgcctacatctacagtacatcaaaaaaaacgcactacgcataacggtgcttggaagttgtacaaaggctccacagtgacaacttacggtggttcatacaagtttaagaatggcaaacgctattacagaattggcggacctgctaagcaatatgtaagaacatcaaactttaattagaagttgaatatcatttacgacagcaacataatagttgctgtttttttgcctcaaaaaccatagaaaatcttctgtaatcaaggtaaaatgaaattgattttacaaatatcatggaggatgttggaatgagaaaacgatggacagcagctgttattgctgctttagttgccgtaagtactgccgcaactactgttaaggctgacgatactaacacaacagctaatactaatgagacgcaagtaactgcaactagtgaccaaactaattctgattcagataaggttacttataacaaggcagattatttgtctgctaaccctaaattagtgcgaattaagcatgcaactactgcttataaggatgctgcattgactaaatcagcacagagcgtaaaagcaggatcacactttttaattagtcgaattgttaaatctgacaaccaagtaccaatactaaagactagtgatggcttgtatttgcctgctaaaaaatctttggtaactaaggtcatagcctaccaaaatcctaagggttatcatcaagtacattacacacaagttaaaccatacggtaaggtgggttataacttgtaccgtggctatgagggtattaagacttggaaagtaatgcatagagttggtacttgggcaggtacgaattactataaccaagctacttataacgcagtaaagaacttccaacgtagtcaccacttgccagcaactggtaatgttaacttagctacttgggaaaagatgggcttttctaagaagtcatggtatagcattgatagttatgttgccccacttaaggcttatgcttggcaagggcgtaaagctcatattgaagcaatgattaatcaagcttacaaatatatgggaaaaccatggttagcaggttgttcaactagtccaagctacggtgttgattgttctggtttggtaatgcaaggtctttatgcaggtggcattagtccagttccaactagttcaatcggccacgctcatccaggcaatgaatggaattcacgtaatctttgggctgacaagcacctaaagcgtgttccatattcacaaagacaatgtggagacttagtgttctattaccaaccaggtacgcacactatttggcatgttgcgatttacttaggcaataaccgggtaattgaaagctggccaccacgtgtgatggttcaaccaattgttaattcacaaagaaatgtaattgctggtattaagcgaccatttatttaaggaaaaatatgaaaaaatacttagctattttattagtcagcctgggctttagttcattattgttaactcgccaaacagtacatgccgctgataatgatgatgccgcgacaactaatcaatcggctcctaagtatactggccttaaaaaagttggtaaacattatgtctattttgatcaagcaggcaagcaacgttttaaaaataccaagactaaaaaagcatattattggattaataaaagcggcaagatagttggtattaataactacgccaaggtaattagccaactacctgaaatgccaactggttgtgaaattactgccgtgacaatgatgattaattttgctggtaaaaaggtaactaaacagcaggcggccaagattatgccgcgcagctctaaccctaacaagggctttatcggttcgccttacaagaaatatccgctcggctattgggttgctcctaatggggtgaaaccagtagtgaagcattatcttggtagagcacagaatatgattaattgtggtttgcccgcaattaaggataagctgattaattcacacttggtggttgtttgggtagggatgtttgacggcctctctaaccatgctattaccttgacgggttaccatggtaaaacgatctattataatgatccttggactggaaccaagcggaaaatcaagcaggaaatttttgcaacgcattgggctttagatgctcatcgggcgttgagttattaattttatgtaaatatatttactttttagtcatgttgatcaagccactttcgcagcatttcaacatattcatctgttttttctacaaaagacatgtgaccgcagttttcaaatagctgccatttactgccagcaagctgatcctgcatcgttttagctacataaggtgtacataaatcatcagtcccactcgtaattagagttgggatttttattttgcctagtttttctgtgtattcgtaatcgtgcaagttgccctctggcgtatattcatttggtccccaggcggtttcataagctacaataccaccacatttttttcgcataacgcattcaggccacgttttcgtcatgtcaattgcatgttgattcatgaagtgctcattagcttttaagtaatcaggatcgttaaaattgctagtcaattcggcgcgatgaattgccgcctgttcttcaattggcaagtatttaatcatccggtgtaattctttgctccataaggaagcagacgacaaggttgaagacaagatcaagctttgaatgccaacaggatgataatcacacatgtagattagcgctagcatcccaccccaactttgtcctaataaatgtattttgcgcaaagccaagtgctcccgcaacgccatgagttccttaacccatgtttctttagtataaagttcagggtgatcatcagggatgctactcttgccgcagcctaactggtcgtacatgataatccgtcggttatcaatttcggctaatttgtccaaaacctcaaaataattatgacttgagccgggaccaccatgtagcaatacgagtggtgtcttttcgcttcttcgaccaacaatacgatagtaagtttcatagcccatgaaaggcatttttccttcgataatttccattttttcacctatttgaacaaaaacaatgagatattaaccaaaattagcagggtaaagaagattacccaatctctagctggtaaaggaatagcgatgatcgtcgaccttctttgcccttcgacatagccatgtgattccattccttgggccagattgtcagctgaatttaaagcaacaagaattgctttaaaatagaggaccggcgaccaaaaactgagataaatgccccgcatcatagcgctagttcggatctgtttaaccgccatcttcatctgcggaataatgttaatcgccgccagcacgccgtaggcaaatttactgggtaagtgcaggttctgctctaatgatcgggcaaagtctgtagcggtgttattacgtgccacgcaggcaatcgtcaaggtataaacatagatacgcgttgacaaattccaagcataataagcatttggtgttggtgaaaaccaaaagagcgttgcaaagattgtaaaagcagcaataaagggcaagataatgagcaagattaactctttgattttgaatcgagtaataattaaataaactagcgcgaaggtgattactaacaaattagtaactaagctagcttttaaagatatttccagggaaataataaatgctaaaagaaattttaaactaggattcataagcttatctttctacatattttaagcgctgatccgcaaaaatcaggtggtaatcgcaaaattcagctagctcgtctatctgatggctaatgataaaaaacgtctggtggagcttttgctggctttctcgcattaattctaaaacgagtttgaccgagttatggtcaagtccactgagcggttcatcaattaataaaacctgatgcttagtcattagcattaatagaatctgtaatttcttctgttggccacctgagagagaataaacaacttggtctaagtgtttggctaaacccaatttatctagccattcattgaccttttcttcagtaaaaaataaatttctatcctttttacttaattctagttcatctttgacagtcacagctaaaaattggtcgcttgctttttgaaaaatttgagctacttgtgttaaatattttctagctgagatttgagcgatttccttatttaaataagcaaaattaccagtatacggaatcattttggtcattactttaaataaagacgtcttgccaacaccattagcaccagtaattagggtagtgccagaatgcaaatttagctcattttgcttaagcaaaagcttgttttgtctaatttggacttgttttaaagtgaaaataggctcactattaggtaagacaaaatgataatgtcgctcatgcaattttttattttgttcaaataaggctatttttttgctagcatttaattcaataacttcttgattatttgtaaactcaaaaagatggtcgcagacaggttcataatcgtctaaaacgtggtcacttaaaataatagtttttccgttgtgagctaaaatcgctaattttttaatcaaaaaagcacgtgtcttaggatcacaactggcaaacggttcatctaagagcaataaatctacatccatagctattaagacagctaaagcaactctttgttgctgaccgcctgatagagtattaatcttttgatcgagaaggtctgcaatttgggtgaaagctgttgcctgatctagtcgtgtttgatactcaccttcatctaactgtaaattttctaaagcaaagacaatttcttcacgtggagttggcattgtaaactgttcagccgcattttggaacatcattgccgccttttgtccgtgcaggtccaccatacctgttagtcgccctgcatatttgggatacaaaccagcgataattttgagtaaggtagatttaccgcagccggtcggtccaattaacagagaaaaaccatggggaatttcaatatttagatgattgataataggttctttttcataagaaaaagtaagattgttaacggttactttcataagcttgattgtacaagatgctttggaaactgtcaaatcttttgtgtaaatagatctttctcgtaaattgattttttaattatttatttaatcaaagtaggattctaaggtgtcctgaacctgaccaaagcctttatgaattcgattgaaataacggtcattgtagctcattgcctgaatgccaataaaagcatcaagcgactgttcagttggaaactctgccttaggcttagctttgcgcttgatcacattgttaaatgattcaatcatgttagtcgaataaattgaagctctgatctgcttgggatagttataaaagaccagcagatctggttctatgtctttcaagcttctgataacatggctgtaaaccttgccccatttggtatagaagtcatgcaggacagctgtggcttcttctttgtttgtctgttgatgcacctgtttgaattcgttcatgatcttttcacgatcgtcgacgcgtactttagcgcagatattgcgcatgacatgaaccaaacagcgttgaaaatgagctttaggataagtcctggccaaggctgttttcatgccaacaacaccatcagaaagaaaaagctcaacttgctttaagcctcgggatttcatgttttgaagcatatctgtccagacttcaatgttctcgctaggtgcaatgcagtagtcaatgacctccttgtgcccattaggcttgatgccaatggcaatatagactgcttcacgctcaaatgtttctcggcgcaaaggaaggtatgtcgcatccaaatagacgcagaaaaacttgtcgcttagcttgcgtttgtggtaagcctcaacctttggaatcatctgcttggaaatatttgatacctgagctggactgtaatggctgccatacatcttttcaattagatcggctatgtccctggtggtcacgcccttggagtaaagcttgataatcatgctttccaagatatccgagtgctgcttgtagtcaggcagcgtgtgctgatgaaactgaccgttgcggtctcgaggcacttgcacttcaattggtccaaactgcgtatcaaccttgcggaaataagcaccatttctagaattgccagtattccagccatttctggcatagggatcatagcctagaaaggcagtcaattcagcttctagcaagttattaacagcctgttgtagctctttgcgcaataaatcatttattttgtctggattgaatagagcttgagcaaaatctttggtaaaatcattcatgaaggagttcttctttctgtatgtgttttttttgttcaaaccaatcatacgagaaaggaactcctttttctaatgtttaaagaaataaatttaaggaatcattcatccttacacaaactattttacagtctcatgctttggggactgtctacaggtagagtttgttataagtagaacaaatcataaataatacttaatactaaataaagttttgatttataatgtaattatagtgttaccatattttatttaatttaaggaaggtggacatatggcagctgttgctttggaccaatatctggcaagtgtattaaagtcaaattcaacagataagaatgaaataaagttggaagctggtaatccagattttgatctgtttactatctaccttgaaaatcataatactggtattcatcgctatcggatggatgtttcaacgattttatatattgctaagggtactgtgacaattaagagtggtgaaaagatcattcaaatgaagtctgggaatgttttgctactgactgaaggttgcaagtatgagattttaagtcaaaaacctgatacggtactgataaagttgaagtttaagcgtggatttctatatcgcaagtattttaaagattttagctgtaagggagaacgtgaggttaaagttattgagcaaatcgttgatagcttagaaaatgaacatgttctttggctaaaaaataatcaaattactcgtgcttctcaagtgatgcaacatattattggcggttatttgaataatgatttgtttactaaagctttaattcaggctgagttgaccactatgttgattatttcaattagaactcagcgcatggcaacaccgactagtttggataaaactaagtttgaaaagaagaccttagataattacatcgatcttcattttgccgatgtctctttatctgacgctgcaaaatactttggcttcaatcctaattatttctctaatatggttaaggctaagactggcaagagttttgtggatcacgtggatgatcgaagaatgcaagaagcgcgtgaattgctggctcagcctgatatttcacttagagagattattggtcgagtcggatattcgagtaagtctttcttttataagaaatttaatcaatactaccacataacaccagcagcgatgcgggcagaattgtttagacaagcaaatatcaatttaaagtaaaaaaataatctggacgaaagttccagattattttttacatattttctaagcgtttaatgcggtctgctgttggtgggtgagtatcaaacaagtgcgtcaaaccgtgattgtggaatggattttcaatatataatccagcactactactatcagctactttcattggttggctattttcaatcttgcgtaaggcagaaattaagccttgcggattacgtgttaatttaactgaagatgcatcagctaggtattcacggttacgcgataaagccatttgggctagggatgcagaaagtgggcctaagatcaacacaaagaccaaggcaaccactttaaaaattatggctaaagcattactgtcacggtcatcgtcgtcatcactgcgcacgccgccccagaaccaaaaattggacgccatattagagataaaagaaatgaccccaactaataccacggcaattgttgaaagtaaaatatcgtagtttttcacgtgtgataattcatgccctaagacgccttcgagttcttcacgatcaagtaattctaaaattccttgagtaactgccaccgcactatgttcagggtcccgaccagttgcaaaagcattgggactaggatcaggaataatatagacccgtggcattggaacctgtgccaccatcgccatatcttctacgatatgccacagttccggattgtcggcttcatgaatttcttgcgcgtgattcaagctcataatcatgttggctggattttgccacatgatgaataagtagactaaactaccgatcaaagcaatagtaacgcccattgttggactattgctccaaagataaccgattcccgcaccaactaagcctaagatcaccaaaaagatgaacataattaacgccgttttgcgtttattacgagcaatttgttggtaaagcatggttaaacttccttaaaattaaaacttaacttgaggcacattcttttcttcactaggagtttctaagtagttaatcttagtaaagtggtgccacttggcaacaatatttgatgggaaagtaagcaacttttgatcatatgttgctacagttgaattataaagttgacgagagtaagcgatcttgttttcagtgttagtcaattcttcttgcaattttaagaagttttgattagctttcaagtctgggtaggcttcagccaaagcaaaaattgacttcagagaatcagtaatttggttagaaagcttcatcgcttcttcatggttaccttgaggcacattaaccaattgattacgtaatttgactacttcctcaaaagttgatttttcatgcttggcatagcctttggtggtttcaaccaagttgggaattaagtcattccggcgcttaagttgaacgtcaatttgactccaagcttcttcagcatagactttcgctctttgtaaaccgttgtaagttactatgtagatagccacgattaaaacaataatagctaaaatgatccaaattaaaggtgacatagtttttcctccataaaatatttatttaattttatcgttttcgaatttcttgagcaataaaaaagaatgtcaaagcggcattcttaacaaaaaatattaaattctgaagattaatagtaataatccaactgcagttaaaataatcaaaccagcaaattgcataatagtccattgaataaaaaactttttcttacttacgctaccgtgttggttgaaagtcttaagaactaacatattagccattgaaccgatagcggaaccaaaaccaccaatgtttgaacccaagaataatgcttgagcataagtggtaaatttaccaactaaaatggttgatggtacattgctcattacctgactagagataattgaagcaaagtaagttgaaatttcagaataaacggtgccatgaattagatttacgataagagggatttgttggatatcgctgatgaagatgaagaagccggtaaaggtaagaagtaaggcatagtcgattttgagcataatcctaggattaattgcaagggctaatgcaaccgacgttagcatttgccaaataatatcaatggttctgaaaacaccaaagaagaagaaaataaagacagcagtagttatcagcgtcgggcgccagctgatcttgattggctcagctttttgcaccggaatttcttctttaggaataaacagaaagactaatcccatgattagcattgaaactactagataaggtacagaccattcgaaaaattttaatgggctgacatcaaagcggctgactgagaaaatattgtgggggttgccccaaggcgtaaatgctgccccaatatttgcgcccatcccaatcaaggtaacaggcaaaatctgtggcaatttataacgcttagcaatatttaaatacagtgggatcaaggtcaatgcagtaatgtcattacctaaaaacatccccgaaatgacagccaacaacgaaaacagcgtgttcaacttacgcgtattatcggcaatacttgtaagcttgtacgctaaaacatccagaacatgcaagtatgcatagatctggataatcgttaacatcgcggcaacagaccataatgtatggaagttaatgtccgcaaaccgcggtctggcaaaaaaaagactgactactgtaatgatcacagtaatctgtaaaattctatctttagcaatattctttaagacggtcataaaaggtcccccttacgtattacaatcgtctaaaaaccctatgtaccattttgagcctttttgttattgcatgcaatgataaatttaaaaaaatatcaagattagcggtatttttgagcatatttttagttagttggaactagtcgtgctatacttaaataagtaagttaataaaatttagattgaaacgaggaaacaaaatgacagagaatgcaatttcaatcaatattaaaccagatgctgcagaaatgattaaaagcaagatggatgcagatcaccaaattgttatcttggctttagatgatggttcaaccaagtattctaaaaaaggcggcacttgtactattggcgacagcttccagtttgtaatccttgctgaaaaagatcctaagtataatatttcaatcgaaaataatgctggtcttgacttgtatactgctcagccggaaacaactttctttgaaccaggtctagtggtaaatgcacgcaactcaactttgagtttatcttcagacagcggcattattgatggtgggatgaccgttacccaatatgaacctgaagcaattactgctgatgatctaaaaaacggcggtcaatgttaaaaaaataaaattaatcatagggacgagggaatgacctcgtccttttttagtatagaattaagaaagtgatttcaatgtaaggggggaagaacaatgacttttgtcaaagaaataaaagcaggtagtcgtgaattttgccaaaattggctgcggtatctgctactttttatgggattaagtttatttaatcaatttattgttattccactttttcgctatattacaacctttgttttgcaggctagtgctattccgttcgtatcttatcgaaatgtagtgacgatcattacgacgcatacggttgcctttttaattttgataattgagttgctgcttttattagtaatcttgtatgcgcaattagcttatttacttcatggcgtttgggatattaagcatcaagtttttacgtggaaaaatagttttattcaaacttggcaaaatatcaaaaaaattcgtttgggcacgctttttattttgatgctctattttttattggtagtaccgttagccgatgtcatctttagaacaccacttttaagcaaagtgcagatttcagaatttatcttggattatctgacgagaacgccaatcttgttagccgttttgattgcgttttatttagccgctttgatccttggtgcaaggctagtatttgctttacccatcatcgtttttgaccacttaaagtcagtgcaagcagtaaaaagaagttggcgattaacggcgcactaccgttggcggacgatttgctggaggattattgttttagccgttttatctgcagcagtcatgacaattttctatttagcaatgtattgcctgcagctattagttgatttattacctgggaaatgtccgttaattttagccattagcaatctttcgcttgttcaaattattagtgaagtagcgttagtctatgttagtgtactgggcttatctattattttgaaagctttaaggcaagaaaagataagtcaaacaggtaaaactaaaaagataattctaagtacattagttgtgtttgtactagtaatgattaatgcaatatctaccaattatttatatttgactagtgtaaatgctaaagcgccagtaattatttctcatcgcggcgttgatgataaaaatggcgtacaaaacacgttacagtcattaagaaaaacggctaaagaaaagccaaactacgttgaaattgatgttcatgaaactaaggataaaaaatttatcgtaattcatgatgagaatttattgaagctaacgggagttaataaagccccgaatgatttaactttacggcaattagaaaagttaactgccaaagaagacggctatcatgctaagttagttagctttgatcaatatcttgaggaagccaaaagactgcatcaaaaattgctaattgaaattaaaacgacggctaaagattcgaagaaaatgctgcagcgctttaatcaaaaatatggcaaaacgattcttaaaaatgcgtatcaagtacaatcactcgactatcgcgtggttgaaggactgcacttaattaatccacgtttggttgtcttttacattcaaccttataattttacttatccgcaaagtgttgctagtggatattcaatggaatattctaccttgaattcagactttatttggcaagcccatttgcaggatcgtcctgtttatgcctggacagttaatgacgaaaaattaatgaagaagatgatgtatcaacaagttgatggcttaattactgatcgagttgatttagctaaaaaggcaattaaaagtttccaaaaggatgctagttatgctacgcgaatcttaaattatattgttgtcctgcatctgtcgaaaaattttgaatctgcatgaagacttgatctgaagggctggacatggtaaactatactagattttcgaaaatctgaaaggaagtatagcatatgcgtaaaggtgaaaattacaacactggttgtgaaccaaatcaaagacctaagaacaagagaaacgcaaagaagcgtgttgctcacgtagcagcagttgttgctttcttgaacaaggccgcaaaagacgaaaacaagtagtctttaataatattgaaataaaagctaggagctgacgcttctagctttttttgtgcttactgaaaaaattaattctaagtgtataattttttacggtaagttgaataaataattaaaaaagcccaagtcctttgaatttggacttgagctcaaacaaaaagaccagtagtctgatgttaagaacaaaaaacacattagaagctggtcttttatgaattcaattgtaactgaaatcgcaaatattataaagtctgaagataattatattaagcgtgaaagaaaaataatctgtttcttcttaaacctgattaaggaaatcatggccttggctttagctaaagttgatgatgaaatgattaccaaggttaaagcacagcaagctcttagttaaaatcacgccacttaagcgttacccaaaagttacgttagttgtaccagctcataatgaagaattagttattagtaaaactacgcaggcaattttaaatttgaattatccggctgataagttacaaattttaatctatgctgataattgtactgatgatactgctaaaattgcccgggaaataatcaagcaatatcctgaacggaaaatcaatgttcaagtaattgaacgaacaggtagtggtggcaaagctggtgtattaaatgatgctttgaagattgcccaaggagaataccttggtgtatatgatgcagatgccatgccagaagaaaatgctttgtattttttaattaaaaagattttggaaaatccggtgagatataaggctacttttggtcgcaataagacgagaaatgcgcggcagaattttttaactaagtgtatcaatcaggaaattgttgttacccagcgaattcaacactgcggtatctggcaattatttaagattggtcgtattccagggactaactttattattaatactgattatgtcagatcaattggcggctggcgcaatggcgctttgaccgaagatactgatatttcttttaaaattatgggctcaggtagtttgattgccttagcctataattctgaagccttccagcaagaaccagaacgcttaaaagattattatttccagcgcttgcgttgggctaaaggtaactatgaagtggtgatcaataatttttgccatctttttgataaaagcaactggcgggttaaattagagactgtctattattcctgcacttttttctggtttaatttggcgattgttttatcagatctgatctttttttctaatttgattgccttaatcgtccatctttggaatcctgcagtagtaataccatttacaatttcgcggagtaatattttattagctcaaattctgctctttaattggctattgatggttttgctttatattttgcaaattaacctagcgatgactacgcaatatgggcaggcaactgacgaacagatttggctagccttagcatcatattttacttattcgcaattgttcatcattgtatcaattcatgcggttacttcagtaatgctagatcgcgtttttcatcgtgatagtactaaatgggttaagactaagagatttgcggattaggtgatgagatgaaaaaaagatggatgctactaggatttttactcgtaacgattgcatttaccggtattatgatctatatcagagcagataataattcagcggtgcgtaatttttttctacattcttggcataaaaattatgtagttgaagaaaagaatcttgcctatattaataccacgcctaagcaggaacaagtgacggttttatctgaaggccaaggatatgggatgtttattgcggcgcatgatccagcagttaaagaaagcaactttgctaagctagtgcagtattatttaaaacaccgggatcgtaatacgcaattgatggcttggcggcaaacaaagaaaaatggaaaatggagcagtgaacgcaatagcgctactgatggggacttatttattgctaaagctttgtttttagcggctaaaagatggaaaaccccagcatatcagcggcaagggcaaaaattaattgccgatattttgcgttatgaatataatccgacaacgcacgctttaacggtgggcaattgggccgattctaagtcgaagtattataatttaatgcggacttcagatgtattgccgacaatgtttgatcaattttatcgtgaaagcaatgattcgcggtggctcttaattaaaaaaacaatgctcaagcggctcaatcagttgagtcaccagcataagagtggcctagttccagactttgcctggctgacatcaaaagatgctaagccagttaaaggaagggttaccactgatcgatatgatggtgattattatgccaatgcttgccgggtgccaatggatttagcatttagtaaggataaattagcaaagaatactgtacatcgcttgcttaaattttttagcaagcaaaatacaattacagcaggctatactttaaaaggcaagccggtcaataattatcaatcagctagctttagcgcgccaatttatattgcggtgaatgaaaatcgcaatcaaggctatgataatttgtttgcttcgcagcaatatatttttgctaaaaaattacctaaaaataattactatgatgcagcactaacgacgatggcaacgatactgacaccggcgcatagattttaagaggcaaaggcctctttttatttgcattgaaaatcaatctttgataacatagtaaaaattttaaggaaaatgaggaggacaaaaaatgggattaaatgcatacattcaaggttttaacagtttagagtcaattgatcgagcaccgggctacttcaagtatcatcaccactcagtagctgaccactgcttcagaacagcggaattagcacaaatgatgggagatattgaagaggtaaagggcaaaaagaagatcaactggaaggctttatatgaaaagagcttgaatcacgattatactgaacgtttcatcggtgatattaagacacctgttaaatacgctactcctcaacttagaaagatgattggtgacgttgaagaaacaatgaccactaagttcattaaggatgagattccagaagaatttcaagaaatttatactaaacgtctctcagaaggcaaagatgatactttagagggtaaaattttatcaatctgtgataaattagatttgttatatgaagcttatggagaaatcgaattaggtaatcctaacccggtttatatgcaaatgttcaaggaaagtcttgaaacgatcaagaagttcgacgatttagtttgcgtacaatactttattaagaaaattttgccagatctttttaaaggtgatttcgcgggaaaggataagatgcaacgaatagcttttagcattctattgttaggggatgattaggtgaaatttcaatgtagttcatgcgggctgcgcatggactctttgcattttaagcaagaggggttaatgaatcctaagttgaccagtatttgcgacatttgtatcacgcgcaacctgaatccagaagattacgcaaatgatgcggtcgcagcttttgctcagagcttgctttacacgtttgtcggtgcaaagaaacaagatcaatcaggttttattgtgaaaaataaaaaggaccgtaaaaaatacgaggcctttttacaagattatgatggcaatgaaatcgcccgccaacagattaaaaggtctgatttgaatttggcggtaattaaaagcgaagatggcaagcttaattatgtgcctaaccaaggcgtaacttttgagcaaaatttaaagggaatgggtttggagatcaatttccagttaaacgaagttgattttattgatcgtgaacgcattcgggccaagtataaataccgctgccaatattgcggcagacgtggccacagcgtagatcataaggatcccgtttctcttagtcacaacaacagcttagataatttaactttagcttgtgcggaatgcaaccgaattaagtcggatatgccttataagttgtttattcaactgaatgatcaaatttctgagatcaataaaaagctagttaagtatgaagatgcgctgggtactttgagagaagaatttgagcatcgtcggcgctatttagcggctcaagtacaccttaagggtgttatcaatgatcctgagctaaatgcgattagaaagcaaaataagagcttacaggatgacattgatagtttacaaagtgattatgatgatttgcgtcaaacgcgcaagacgtattttgatacgggctggaaattagctcgcattaaggaaaataaggatattatttaaaacgtaaaaaagcgctattttttgtaaactcaattcaaaataaaaaatgagttttaaaaagatcatccccatataggcaatgtcattaagttaagacattgacaaattatcgacttggacttttaagatcattcatttgcgatttatcgcatttgaatgctcttttttcatgccaaataaacccaaatcttgtttagaaattaggctacacgatataaataatatacagctgatttgggtttgagatttcttttgtcttttcgtcctggtctgatcggaattgtgtaatgactaatttgaataagaatctttttaaagatttcagttgaagaagaaattatatacatagcctggatgacaaaacatgactgtttgaaattgatcgcatattgatacttgcattttttttgtggtacatatgcttgagcatcaatttgactgactgcgttaaacataatcatgtgggcatagatctccatttcaataaatctatcctgcttggaatgaaactgtacgctacctaaagcatatttcaactttttgaatgaagtttcaatgccccagcgcaaatggtagatttctttgatcctttttaagggataatcggctctatttagattagttagaacaacttcccattcttctttgcctgatttaggatcattaattctaaatttacaggcacgaaattttattgtacataactctccaaagtcccagctgccatctttggtatttttagaccgatattttatatattgacggtaatgatggttaaccaaatgaacgttttctgtagccttatgggtttcataataataattagaggtagtcacccagcaagctatatccttatcacactcttgattaggcaactcagctacttccttaaatgcgccatatcccgttttagtacgtatgacataataacagttaggcaggcgattacaattttcaatcatgttaaagccggtataacctcgatccatagtaactatatatggtccgcaatttagctttttaagcatttgaacggcggctttacgttcatccatctttgacttaggctgaaagatgcagtcttgataagtattatttaacaggtcatagagtgcattaacatgaatttggcaatatggctttcctttatgattgagatttccaacgatattctctgatttaggattccagatttgattaaaatcagacccatcaatggcaaatatacgatatttatgatcaaataactggatattaaataaattctgattaaatacagttagaatatgcttaaaacatgcgggtgaaagctgacctttgcgttggacataagcggaagtactgactactttatcgttatttttaatagctttttggccaaaagctctaaacaactcactggtcaaatcttttccttgcatattaatagtagttttaatgactgtagctgcatctaaaaaccgcttcctagtgaaggcatgaggatcatcgataaaatcatgaatatgctttccagtatcattgataatttgatcaagacgatctaaaatatttctgtgaagggctttcataattaacaccagctttctggcaataattttgaaggtttaataatttaatcagagggcgaaaaggtaggttcttttcgcctttattttatgcaaaaaaagaaccaaatcataatgattcggttctacagagattagattcaatttgtcaatgtcttaacttaatgacattgcccatataggaatgatctttttaatttttatctatctaattcgatcttctggatcaaataaatatttgtcccatttaacttcattttgaacagtagggtggaagagcaagaatgctagcaacagttgaccaacgtaaggaattacgcccagccaccaccaaccaccgttaaagcctgcgtcgtgcagacgacgaacagtgtgacctaattgtgctaaaaaggcccaaatagctgctgcaataaagaaaataataaaaatgatgaagattacaccgattaccttggcatcgccagaatcaaattcagtaacgctgaaaggagctaaaagcatgaaagcaagtaggtaacaagcaaatacgccgattgtcatgataacttggctaattgcagtacctacccagaatgaggttctagtagatctagcatcccacttaaagcagtcaaagaagtgttccttcaagatttgaccaatagttggtacaggaacattactttttgcgccacccttaggataatcttgatcgctgaacaagtatttgccccacttaacttggcgttgaacagatggctgcaattcaagataaaataaaaacattgcgccataaccagtgaaggcagcccagtaccaatagccgctgtagccaacatcgtgcaaacgtcggatcgtttgtcctaatgcagctaaaaatagccacagataaacaacagccgcaacaataccatcgactattctaatgccggggttgatgttttggttaaaagcatagaagccaagaaggatgcataagatgccgataacaagattaatcaaagtgctccaccagaaagatttacgcgtagttcttgctttccagttgaagggatgcaaataagcctcgttcaaaatttgcgcaaaactttctgcaggcggcagtggcagactttcgtcataaggcttgataaaataatatactctatcattcattttacttcctccaaaaattaatttgttataaattatacgctaaaaaagccgtgaagcaattaaacttcgcggcttttttgatattagaattcattatttctaaagttgctcaagaacttttgcgtcttttcattcttaggatggtcgaataattcttccggtgaaccttgttcagtaatgataccgtcactgatgaacaatacgcgatcagaaatactcttggcaaagcccatttcgtgggtaacgatcaccatcgtcaaaccggttgtagcaagcttttgcataacgtctagtacttcgccaaccatttctgggtcaagggcactagttggttcgtcgaacaataaaacttctggattcattgaaatcgcacgggcaatagctacacgctgctgctgaccaccagataattgttgtggcttagccttaatgaaaggatccatgccaaccttttctaggtttttcatggcaatcttgcgtgcttcatctttagaacgtttcaagactaattcttgaccgaccatgcagttttctaaaacatttttattttcgaatagatcaaactgttggaaaaccataccaacctttgatctaaaggtattgcggttatagccgggatgcaagatatttttaccgtgaaaatcgatctcgccgccagttggttcttcaagcaggttgatacaacgcaaagtagttgatttaccaccaccagaaggaccaatgatcgttacgatttcgcctttattgatgtcaaaggaaatatcctttaatacttggtgatttccataagacttttgcatgtgctttaagcttaaaattacttcgtttgattcagtcattaattatttgcctccgcatcttttggagtaccaacttggacttggttagccatcaagttgtaattcttattaccttcaagtctcttttcgataaagttgaagattctagtaatagtaaaggttaagatcaagtaaattgctgaaatcattaagtaagttgggaagaacttgaatgattgactggcaatagtagtaccaacgaagaacaattcagaaactgagatgatactcaatactgaagtatccttgatgttaacgataaattcgttggtgattgatggtaaacagtttctaatagcttgaggcaagatgatatgccacattctttggttgtgggtcataccaagtgcactagctgcttcgaattgaccttctggagttgaaataataccaccacggataacctcagctaagtaagcaccagtgttaattgacacaataatcaaagcagctacagttctatttaaattcaagtgccagaattgggcaataccatagtagattacggctgcttgaaccatcattggtgtaccacggaagatttctacataaacagataataaccacttaactacgttcaaagtccaacgcttgccgcgagtagttggagtaggaatggtacgaataattcctacaagcaagccgataaagaaaccaacaatggtaccaactaaagctaaaagcaaggtcatgccaatacctgacataatcatgccaccatattgcttccaagtagtaactagccagttttctttcttagtttcgttaccagccttaggttgttccttgatggcttgtgacattaattgatcacgctttttattagaaatagttcttaaagtagcgttaacttcatttaaaagcttggtattaccctttttaaccccgatactagttacggaatcgtcatggtcaactttgaagccagccattttgtttaagttaactgcaataatgttagggttaacgttgtggtaactttcaaattcaatatcttcagcaacataaccatcaatggtgccagaagctaaactttgacgcatggctgaaaagtcacgcatagctggttctcttttagcaccttttaattgcttgattaaatcgtagtgcaaagttccttgttgtgcggttaacttggcacctttgaaatcagtcaacttcttagcattagaatatttacttgccttattagtaattacgacgaaagtacttttacgataaggttctgagaaattaattgccttgcgtctttcggcagtaggagacataccagcaataatcaagtcgattttgcctgatgtcaaagctggcaatagaccatcccattgagtcttttctacgattacttttttgtgtagtcgtttaccgatgatcttggcaatttgaacatcataaccattagcataggagttagaatcatcaattggaacagctccattagctttggttggctgagtccagttgtatggaggatagtttgcctccatacctatttttaacgtgccagaatctttcttagcagcttgagtctgattgctactaagagaaaaaccgataaataaactgagtaggacagacattattacagccatccatctaaatcttgacttcaattataaaacctccaaaaatagttttaacataaagccaacacaataaagagtaaacaaaaacctcgctcttccaaagaattgcgagggtcataatcatcagtgtttaaaccaaatcttatagcgctccctgggaactaaccaggacagtctatagaatattcttctatagcccaacagattaacacgcgaatattaaatctatttcggcggcaaccctaagttaactatcattgttttcgcgaactcaaacttaacttgtgattgtcgcaacctctattgcattggaaaaatatttaactaatgaagaatactagaagaaaaagttaaatttgtcaagcccaaccattattagtttcataatttctctttttcatatcagaaacataaggatttcctgctacataaaaacgtaattttttgttagcccaaacgggatcagattgattgataccaacacgcgctgcagcaattatttcctggggaatttttttatgacgatcatcaagatcaatggcgaaaggggagtctgataaaaagtgcaaattccaatttttatcatgaataccaaaagcttgcatcatttttgcgggaccattagtcaaaagaacgccatctttaccatgacggttcttgatcatggtctcaattcctaaagtgggatcgattgcacggattaaaacaccctgtggttcattctgaaccctagtggcaacatcaaagaaaaaatattgacgttgcgcgtagatatagatcgttccgcctttgccgtaaagtccttcattcgctgggctacgacgaccgccataagaatgtgcagcgcgatcctttttacccatatatgcttctgcttccacgatatagccgcctaatttttcttgaccattatcaaaagtaagcattcgcccaattaggtcttttgcaatataatcggtagtgttagtagaaaaataagttgaataattcatttttgacctttctagaaaagagataaaaaataatgacagaaattaaattagttcgaatttatgaccatgagcaacctgctggttatcggattttagttgaccgtttatggccacggggaatgagcaaagttaaggccgatttagctgaatgggataaacaaattggccctagtaaggaattgcgtcagtggtttaatcatgaagatgaaaaattccctaagtttaagcaaaagtatattgaagaacttaatcataatgattatacagcggaatttttgcaagatgtaaagaagcatttggctaaagaagatgttcttttcttatttggtgccaaaaataaagagcacaaccaagcagttgtactcaaagaatatgtattaaatacgctaaacagttaaatatgtttgtgaccgtgttttttaactttccaaaagtggaagagaattgtcaaaattaagatcgcaaagacaataattgcaaaaacggtgtttggcaactcaaatctcaatggtggcagagctagtagcaattttaaagcgatgattcctatcaataagtaagccattggctgcaattctggaataatatccattaatttaatgataatttcggcaactcctctcatacagagaatgccgatcatgccaccgattaaaacaacaacggggttatcagacacggctaaagcagctaaaacagaatcaattgaaaagacgatatccattgattcaattgaaataaccgtacgccagaaaagagatagcacatgtctctttttctttttgcctttgtggcgagctgcttcgcgctcttctttttctttctcatgttcggcagcttgtttagggtggcgttgatcatagaagaatttaaaggctaggtaaaaaagataaatactaccagctaatttaatctcccaaaagttgatcagataagtcccgattccgataacaataaagcggaataaataagcaccccacaagccataaaccaaggacttgcgttgttcagctttattaggtagcacctgtgtctgtgcggccaaaacgacagcattgtcgactgataacaagcattccatcaagattaaagtcagaatgatcatccagtctttgccactggttaggacatgtaaccagttattgccgtcaaaaaagggtgcatatagtttaagaattgacatgtagttgcttcttttctaatttaattaatctgattttttctttttgtcccagacgataagtcccaactttattgttggataaaataactctttggtcaggaataaaaatcaaaacagggtttaatgctacggcgtgtgcaactgagcgagaagatgtggcttcggctagtgaattggcgacgtcaccataagttaacgtcacaccataaggaatatgctggacaacggctaatacctttcgttgaaattcagtgccgaattccgaaatatcaataggaacatcaaaattctttctgataccagcaaaatattcctttaattgtttgatatgaggtgccatctttttagggtcccgcaccaacatgcggtgagggtagaagctaaaaataggtgaaacagtttcatctcctttaagtccgacgtaagttaggccggcttctgaagctgttaaaaagtaggtccatggctcaattgtaacgtaatcatagtaaaaaaactctgtcatgtgtaacatctttattaaaaataattagtctaagaataacaaactaggaaagttaattcaaattctggaatgctgttaatgcatccccaattatttgcgtgacaccaggggtaggaatttctgtcttgttgatagagtaaattttggcgtcttctttgcgataagccaagagctgggcaaaaggataaactacaaaactcgtcccacaaatgatgatcaagtctgatttttgcattatttcaacggactggtttaatactttcggatcaatgccttcgccgtataacacaataccggggcgaataattccgccacaatctttgtgtaaatagcttttagcatattcttcataagaaacaggttgatgacatttagtacaataaatattatataaattgccatgaaattctgttacatgttgattgccagccttagtatccaaagtatcgatattttgggtaattaaattacctttttcattacaaaaatgggcgattttttcatggattaagtttggtttagcagtaggaaagtacatattgttcatgacaaattcatggaaaaattcaggtcgattgaatagcgtactatcgctcagtatagtttcgggactttcttgcacgccatcatagattccgtttttagagcggtagtcagggatacctgagtgggtagaaacaccagctccagttaagaatacaatatgttgggcattattaatatctgtttgtaattctgctaaatccatcatataatgtcaccctccgtgaaagtcactactttaattataaatcattgttttgttataatgactgaaaattgaaagcaccaaaatcaagctcaagtcctgtcactattgagctttcttagacgtaattagtttttatatgatctgtttcagtgcaatttgtatgaatcgtggcagttggttaataaagtcattgattacttcatctatcttttcaaaactattctgtttaagctcttttaattctgaaattaagtagaccaatgcatctacgaatctaatatcaggtaaggattcgttcattagatagaataaatctccgattgtcttatcatctgtattttgtctttcctgccaggtcaatagatcataagttattgctgtaactgcgatatagccacattggccatcatagctttgaacttgagatttatctaaagcaagatattgcttagacgtcttaaaatatgtttcaatttgccatctacgaccataaagttggatgatttcttcagggctaagctttgtctgagtagtagctaaaaccaaatacttgttcttgtttccacggttggagacaaagacgagctttaataaaaagctatgtccatgatattgagcctcaactatgcttgaataaagataatgtttctttttacggatgtttgaagcagccaaacgatcatacaagtctttaacgctatagcggcgatggcgataaatgtaataaatctttgaactcttcttgatcatgccaagtccatctaaaccgatcttctttaaaatccaaaacattcttggagaagaaaaccaagaatcgaataagacgtatttagcttctactcctaatcgtaaggcttgtctaatcaactctacagttacatcattcatctttctctgagcttgatttctccttttaccagaaattgaacgttcatcagcagtaatgggagcagctccaatcatatttttcttggttttggttgacatcaaggcaaagttaaccggcaagaaggtattgccatcgctccagcctaaagttaaaccacgatatccgttcaaatactcatgcttgtcatggtcatagactttagctagcaattcggtctttttagaaaaagaccgagccatcagcgtatcgtcaacgataaaagcaagtcggcgtcttttatcgataaatggttttaagcagccaatgagccgggctgcaatcaagcataatagtttttgccagttgattcttccatcgttaagtacattgcgagcagttctaacggaaaaacgtttgtcatccttagctctgaataaagaaagccgagcaaaatgtactgacatcagccaagagataatcatggttaatgaaacggtggatttacgcttaaaattgacttgtttagttaacttagctagaccaattagattaataaatgaagaaattaaggatttagtatcattttctgtgtcgatttgttctatactgttcattgcgcaggatctcctttactttttaggtcgacacttaaagtataacgcagagagagcctgcgtttttatttttgataagaaaaagccaagaggcgcggggaaggagcgttaatcttagctttcaagtttcagtataatgattaaaataactaaattgaggggatttttatgaaatatatgacgtatttttatgtagcaattgatattttattagtagtttatgcttgttatagttggtattggcaagctaaagttgattttcgtggtcgctatcgtatctcctcagttgtttgggcgctaatttttatctggctgggctttacatggaattacattgaaaaaggtgatccaggcctgagcgtcttcttggctctttttatcttaattagtattgtcgatggtttttcaggatttagtaaaaagcggatggtcgtttcaggctacttcaagcgtacagttaagtatgatgatttagccagcgctactttaatccagatccccaaccaagagaagccattagtgatggcgatttttcgaactagcgatggtaaggcttatatgatgcgctttaataatgaagttaatagcgtaattaagcaattacaagaatatgctggtcgagaaattcctgtcgaagttcaatcaatgatgtaattacaaaattggagaaagcattcgcgagaatgcctgcaaagtccgcaatgcgcgactttgcttttttatttcttccttagttagtaaatgcgagtgtttcatatcttcttcaaaagctgccaccattttctggttgaactttttatcataaaaaacggcattatcttcaaagtttaagttgtaagaacggaaatcttgattcattgaaccaactgaagaaaaatggtcgtcgacaatcgtcgttttggcatgtaaaaagccatcttcgtagatataaattttgacacccaagcgagttaattcgttggcataccactgtgtggcgcgataaataaaggggtggtctggcttacatgggatcataattcgtacgtcaacacccgatgaggcaattgtttgccacgtagcaaaaacggcatcatcagggattaagtatggtgtttgaatccataaccgtttgcgtgccaaaagcattagccgcatcataccgttacgcatatatggtgcataacgatcaggcccgtctgaaatgatttgcgttgcaacgtcgccttcgtggatgtttttttcatcaagatcaggaaatagagtggaattgaaacgtatgagctgttgattattagtgatagaggcattccagtccatgacgaaacgctcttgcaaaagcagagaggcagaaccaacaattcttacctgactatcacgccaatgaccaaacttcttttttttgcctaaatattgatcaccaatattaaaaccgccagtccaagaaattcgcccgtcgatgacaacaatcttgcggtgcaagtggtagttaatgcggtaacgggtgatcatgttgcgtgaagtgacaaaaggcaaaacttccccgccagctgcccgcaattgatcgaaccatgctttagtagctcccattgaaccccaggcatcataaattacgcgtactttaactccttgttttgcttttttaatcaatagttgcaaaacacgattgccgatattgtcgctataaaaagtgtagaactcaacattgattatttccttagctcgtaccatgtccttaagcatgtcatgaaagaaggtttcaccttcggtatagagcttgacctgattatttttagttaggggagcttcttgttgatggttaaaaaagttaattgctatattaccagcctttgaagtgtcagaaggactagtatttttaggtgctttagcaatcgatttttgaacatttctcaagccaatgtgtttttgcttattgatggcaaaaatattttcctgggaaataccccgaccaaagaaggcataaagagtaatcccgactactggtaatactaacaggatgattaaccaagcccaagtggttgaaacggatcttctacggtggaagacaacgtagaaggctaagattgtgttggtaatgataatgattctaacaaagtcatgccaccagatcataaactcctccaaaattaaactacttttttaatttaagaaacttgtcaataatatcgattacaaacggattgtcatgcatccaactatgttcggcgtcatctttaccgcgtacttctacttcttgataaaaatgtgcttttggggcaacgatatagcgaatgctttttgcggaaacaacagagatgaatttatcagtatttgtgttatctaaaacgttgccataaatattcaagaccgagatatcaggattgaatttgcgccgattaaaaaacaaataaaggtagtgcgggttcatgacactaggccgaccactttcggtcaaatagttgacgtttgggatatcgcccaagtaagtgaccccgtcaaaaggaccagcgataaaggcacatttttttaaatgtgggaacgttttgctgcggtagtgcttcatttcagtgcgaataatacatggacaggctaatgaatgagcgactgcaatatagtttttaaaaccatatcttttagctaaaaagggcaggacgaagttgagataatagtcgatgccatagataccgactattcgctggcgaaaagcaacctgcacgataggatgcttgtcactagtccaagttccttctaatttgaaatttcctaataaatcaacggttacctttaaaaacttgggattgcccttgtcataagtagcgtgtttcaccatcacgcgagtggtataatcaccgccgcgaaagccatggaaataaataatgggtacttgttttagatcgcttttttcaatgtttgccttattttcaatatggcgcttgtgtaatttgaggaaaattcgcgtgggagcgaaggtggccatcagccccaaagaaatcatgttaaacatgctaggttcttcttggaggtcatgtttatgatctttttcaacttcttcagcatatttttttgtgttgaaaaacatttttaccaccttctctttcttttttcctataataaaagttatgcaataagtatattttaccattgggtaaagattttggaattttagaggtagaaatgaagttttatgcagtcaaaaaaggacgtactccgggaatatatcggacttgggatgcagccaaagaacaagttgatggcttctctggtgcagaatataagtcatttgaacaaattaccgatgctacagattacttagattggaatgcccaaactcagagcgatgtcctgcaaaaaggtgaagataatttacaaaacgccgtaaaaagggtgcaacaaaagagtcaagaaataaaaaaagcaccgcgaaaaaaggcgaagcagtataaccatgttaatagcaatcctgctgacttctttgcggtgacttatactgatggtggcacgcgcaatactggtgtttataagggcggtcacgttaaaaagaccgataaagcagcctgggcttatttaattgaatgggatgaccagaaagttcatggctccggtggtgaatatggtgctactaacaataagatggagcagacagcattgattaatgcactaaaaaagctgcttgagcttggttttaacgataaacatctattatttgttcttgattcgcagtatgtgttgaatgcgattaataagcattggctacaaggctggaaaaaacgtggttggagacgttcttctggaccattggctaatgtggcggaatggcaggaattagatcggttattaaaggaatttcctgatagtacgtttgaatggacgaaaggtcacgctaataatcgcggtaatgaatttgtcgatcatgaattgaaccgttatatggatcaaaaaatgtaagaaaaaaggctacactgtagccttttttaatttaaaataacgccgccgaacaaaccactaaagaacttaacgatttgatcccacaaattttgtaaccagttgcggttttcttgggtattaaatttattgaagatatttttagctccattttgaatctgactggataatttcgaagcctgttgcttgaagttaccgtccttcaatgcccctgaatcacgaatttcaattagaagattgacaatttgatttttttgattgttgttgatggtgtcacctaagtggttaatattaatttgattgttgacaatgtcgcgaatttgactgtcggtaatgttttgcccttgtttagccatctcattcttggcaccggcaaccgcattgttcaattgagcatctgaataaccttttttgtttttattatcttgggtaatcccagacaaggtattcatttcatcttgagcggcattaacttgcttttgatttaatgcattgccatttttagcataggcagcataaactccagctaatgcccctgaaccatcaattggaatagcgctagtaacataaatgttggcatcgctgatgccggcggtcagggctgcgtttttgtactggttggcagtaatagtcgtgatattatttttaccatcgtagtctaaaattttaacgttgattccgctgcctgagctggtcttttggatcatcgcactggaccaaacaccggatgaagtggtgaaattatcaccagagggatttaaatatttaaccagatctgagccggtaacagtaattgtttgataattaccaccgtttagtggggcggttaaggtctttaatgtgccttgcttttgcgcatcagttaatgatgtacctaaggtaactacaggtgtatcatcatctgctaatactggcttagtaaatgagatcatcgcgaccacgcttaataacattgctgtgagtagtgtgataaatttcttcattttttcttcttttcttcctttttgatcgaatatttattcttgtaatacggaacattatactaaatatttttcaaaagtgaattaaacaacacgtaaaactttcttaatttcgaccttattattgaagatggtataataaagagcaacaaagggggacaatatgttacaagtgcctaagttaaccatcatcatgcctgtttataacacggcgcaatacttgccacgtgcttttgatgctctgcttaatcaagttgacaagagcttcaaattgcttgtagtagatgatggctcaacagataattcggttaaggtagccgaaagctatgccaatcgttttccatattttaaaataattaaaaagaaaaatggcggcccatccgatgcacgtaatgttgggatgcagtatcttgacacaccatatgtcacctttcatgatggtgatgattgggtggatccaggctacacatccttttttattcatgcttttgaaagtcatccagatgtcagcttagtatcatgtggctattggatggattatcctgacaaaaagcaacgcgttgttggtcgaccagaaggtggctatttaacgcgcggtgaaacttatttgaagttgactaatgtctttagctcaccaatgaaaggatatagctggaacaaggcctataaaactgccattattaagaaatatcatttgaagtttgatagggatatttcactactggaagatcagatttttaacgttaaatatatttctgtggctaaaggcgtctactacacgcaaaaaccttattaccactactggcagagaaagggcagtattattcaccagcctaatattaaaaaagttgcggataatttccggggaaattaccgggtttggagcaaaattatcagtacaatgatgaaagaccgcgaggaagaaaagatgcgtaagaagttagagcgacagcaggccttgcgtgatagtgaataggggaaaacatgaaagaaaaagttaatggagtcgaaatttattatcataagttaggtaaaggtgagcctttgcttttactacatggacatcacttagatggtggtatgtttgataaaattgtggctccgctttctctttattacaccgtttacgtgcttgatatgcggggccacggccttagtgaaggcgacattgcggaacactacaagaccgaagtagaagacgtctatgcctttgttaaacaggttggcattgaaggctgctattgcttcggttttgatgcaggtggtctggtggcaatgatgctagctagaaaacatccaacgatctttaagaagatgattgtagctggcgttttcgttaatggtgcaggcattagaccatatcactacttaacggaaggctttcatcgctttttgagacttgatcgtgacagccgcgtagagttgactgagtcctttatttcagtagatgacttgaagaagattactacgccaactctttgtgtagtaggtgaaaaagactgggttaaggttgagcatgtacgttggtatagccaatttatgcccaatgcgcggttggtgattatgccacggcagacgcatgacagttatgcagtgcgcagtttaaaactgctggatttgattaaaggattttgtaggtaatacgcgtggtgctagttaaatcgttctaggcaatatgccatattataagctaaaatggctatttctagccgctgctgaaagccagctaagctccttgctcggttattttcagcgttatagtaactgagcaaagaaaagtcgctttcaattgttcttctaattgccatcagttgatgattattatgttttttagcacctttcatgttttttcgatatggtgtccaaaggacatagcccataccttttaactcggcagctaagtcttttcctaagtagccttcatcgcctaaaagataatggttaattggatgagcattaatcatcaattctgtcgtttctttggcatcatgcactgatgctttagtgactgcgtagtcaagcaaatagccatcatcgcttactagcgcgtgcaccttgaaaccataataatagactttcttggttgctttatagccaatatcggctatgtcacggaagatcttaacacgataattacgaacaggctgacaaactggaacaggaaaactgtcaataattaaaaattctccagcaacctttacctcttgattccaagcttgacggatgcagcgaattaaaggcaaaagcatcttggctcgacgattaaagcgagaatgagataagccaacaaaaaatttacagaatcttctttgggattcaattccaatttcagtttgccaaatgagcatcgctaagatggagctgtcggaaagctttgtttgatcaatgttttttcgatgcgtaagcttatcaggcgcataaagattatatagtgaacgacaaattacatttaaacgactaaaactaacttgtaaatggtgagagaaacgattaagcttgaggtagttcaattagatcagactcttttctatttaatttacttacaacttgagtctaatccgattggacttttttattaactaaaacgatttaactagcaccacgcgtaggtaatgtggatagtattgctggttaacgtgatagttgctgcagttgctgttatatttggttttcaaaatagggtagaaacattaaatctgttcaatgccggtatagtttttatcacttttgggattgttttacttttaggtgcaattcctgtttatcaagatttcagcacgtcatcaattttaatgttcattgcaggcattttaattattgttagaattattatgctagctgttagtttaattaccaaagtgccaagaacagtaaatctacaggatattgcaatttcattgatgatcgctgcagtttgtttgatatatttcatgcacggtttaaatctgagcttaagtaatttagtcgtgccagaattagcattgattattggcattattttgttttattttaaaagaaagcgtcaataaaattgattgcaaacatggacatctcttcaatagaggtgcctttttgtatataatggtggtgtatacgatttttattcagaagaggtaaataatgaacaaggaagaacttcatcaattattgcacccaatgaaagttattggcttaggtggtaaccctgcattaaatgaaaaaattgcggcaattttacaccaaccattgatcgaaactgcggttcaccactttagcgatggtgaaatccaagttaacattggtgaatctgtcagaggttgtgatgttttcgtaattcaatctatccaagatccagttaacgaaaactttatggaacttgaaattgttttggacgcacttcaacgtgcatcagctcatataattaacgtggttgtaccatacttggcatattcacgttcagataccaagactcgttcacgtgaaccaattaccgctaagttagtggctaacttgcttcaattgactggcatggatcgtttaattactgttgatctacatgcctcacaaattcaaggtttctacaatatccctgttgatcacttacatgccattccacttcttggtcaatacttcttagataacggaattgctaccaaggaagatgatgatatcgttgtagtctcacctgatcactcaggcgctaagcttgctcgtaactttggtcaatacttcaatgcaccgattgcaattgttgatcaaagaggtgctcgctatgatactgaggtccacgacatgattggtgatgttaaggacaaaaagtgtatcatcattgatgatttgattgatacaggttcacgtatttcttcatcaactaagtcagttttggcagctggtgctaagaaagtttacgttgccgcaacccacgcacttctttctaagaatgctactggagtacttaatgaattaccaattgagcaaatcgtagttactgataccattaagcacaagcgctacccagacagaatggtcagaatttccgtagaccaattgcttgctcgtggtatcgattatgtatacaatgatcgttcaatccaccaaatctttgacgaacaaaaccgtttaaagtaaaattcttattgataatttgaataaaaaatgatcctcactatgaggattattttttattcaaaaaatcgggtagataagttataaaactatgtctaaatagtaatgattgatataattgatatgtgttgtatagaaagaaaaagagaaagttagaggaatagactatggcacgacggaaaaacatgaagagacggagagttattctaggtaatactttccatctgatcagagaaaatggaatggataatgtttctttgcaaatgattgcagaaaaatcaggcatttcaaaatccttactgcagtcatactatcctcataaggctaagttaactaacgacattatccgcaatctttttaatactttaggtcaacaagttaataattatgacatggctaatagcaatcttccttatgctagaactaaggcatttatttatacgattgctatcttggggatgcacgatgagggcttggaccgtattatttctgaagcttttgttagcaatgctaccctagataattggggaatcatgcttaatgaatggattaaggaaaatcatttatttgatgacattaacgttgacgaaagcgaacttgagacaggaattgcgtttgtaactagtggtattggccgtctatatcatgatcgcaaaaaacaccatttaacggccgaagctcttgctaactatgcaacaagtgcattgatgttcagtttcttgcattgttcttctgaagaaattgatcaagccttaaaagaaggacatgaaattattgaaactgctgatatggaagttgttcaccgagcaattgatacaatgttcgatgaaggcaaggaaattttcagctaaaggggagtcgccatggttgaaggcaaaagagctgatttgcgacgaatgggttatgagcaaaataaccaatataaacgtttgttggctttcgtcatctttttgattgctgcattatcattgattacagctacttttttaaatccaatctttatgaaaaaacagattaggactagctataatagggcagtagttgttcgccaagtgaataaaaattatgatagcctagctgatttgattaatgcagatagtgaagataattcaaacttactatcggatacgcaaactcaaccaattgccgaccatattattgattattctttgggtattcattggtttaaggttactagtttgccactggctaatcagattttaagcgatatcgatcaaggaattgctaaaggctcgtcaagtggggcacaggaagttaaccgtaaactgaaaaagcagggaactaatgcaccttacgcgattattaaagccttcaatttaagtgtgatcactttaggagcaaatattgctggtttattgtttatcgttaatttgataataattattgttaccattattacaatggtttcgctactcaacgatatgaagtcgcgggctacaattcgaatggtgattcatgatacgatggctgctggcatgtgggcaggtttttggctaattttgatttcaggcttgttagcacttgtgccagtaatctttaatgtcgataatatcgaatttggctttttgcttgagattggcagtagcgtctttttggaatatgtaattgctggggtaattatttacatcatttgtgcgataccatggcaaattacagctgctaaataagaatgagaaaacgtaatctgtagaatgattacgttttttgtttgcacaaagaatcatctttctttataattaaaaaataattaacaaatttcatatgtttatattttaaaagaattgggcgagtttatgaaaaaagctaaaattataaagacttttcttgctttcattactatgctttcgactctttttttgtttaatcagcctgttaatgcagccaataaggaggttgagactggctcagtgatgaaaaaaattaagcagtcgaaagaattagtagtgggcacctcagcggattatccgccactggagtttactaccagtgaaaatggcaataccaaatatgtgggggttgatatcgagttggcaaaagatattgccaaggatttacatgcaaagctagttattaaaaacatgagctttgattcacttttggtagcgctagagacaggcaaggtagacatggttatttcggctatgacacctaatcccgagagaaagaagagcgttgatttttctaagatttattacaagccaagtggcgaatatttcttaattaacaaacgcgatcaggccaaatacaaaaaaattaaagattttgctggtaaaactgtcggtgcgcaaactggtagtattcagtattctttgattcaaaagcaaatgaaacagtctaaggttaaaggcttaggcaaaatcaacaacttagttctggcattaaaatctaataagatctctggcattgtcatggaagaaatgactgctaaggcctaccaacaaaacgacaatagcttgatggctgtgagaagtgacttgcgtgaacaacaagctggtaacgcagtagcaattgctaaaggacaaaatgacttagtagctgctgtgaacaagactattaatcgcgttgaacaaaaagatttgattaataagaaatacttgcctgaagcagctaagtatatgaagacagcgcagaagacgaacacgatgactaaatatattccttactttattaagggagttggctataccatcgtgatcacgattttctcagtgttaatcgggatcatcttagggatgctcttagccttaatgcgtttgtccaagaataaattgctgcactggattgcagtttgctatatcgaattcattcgtggtacgccacaaatggtgcaaattttatttgtttactttggtgttggagcattaatttctaacctgtcagctgttgtagcggggattatcgcaattgggttgaactctggtgcttacgttgcagaagacattcgttctggtattgcttcagtagctaaaggacagactgaggcggctagatcattaggtctttctcaagctaaggcttaccgctatgtaattattcctcaagctttgaaaaatatttggccggcactaggaaacgaatttattaccctgctgaaggacagttcattggtttcagttattggggtaactgaattaatgtaccaaacggaattgattcagacttcgacttaccgtggtgttttacctttattcattgccatgattatttactttatcatgacatttactttaactagattgcttaattatttcgaaagacggatgaaacacaatgactaaaatgatcgatatccaacatttgaagaaaactttcggcaaaaatgaggttctgaaagatatttctgcggaagtagataagggccaggttatctgtattatcgggccatctgggtcaggtaagagtactttcttgcgttgcctgaatgtattagagcgtcctacgactggtaaaattgtttttgatggaacagacttggctagtctaaaggatggtaaggaacttgatcaattgcgggaaaagatgggaatggtttttcagaactttaacctttttcctaatatgaatgtaattgaaaatattaagttggcaccgatgaaagtcaagggtgttagtgaagctcaagctgagaagactggactagtcttacttgaaaaggtgggcttggccgatcgtgcaaaacaatttccagctagtttatcaggtggtcaacagcagcgggtggcgatcgctagagccctagcaatggatccggaagtaatgctatttgatgagcctacaagtgctcttgatcctgaaatggttggcgaagttttgaaaacaatgcaagatttagctaattcgggaatgacaatggtgattgtaactcacgaaatgggatttgctagagaagtagccgatgaggtctggtttatggctgatggctatttacaagaaaaaggcacgccacaggaagtgtttgaacaccctactagtgaacgtgcaaaagatttcttatctaaagttttataatcaaaaaggctcaagcattgcttgggccttttaatttactcatctgtaatgatggggtttgataatacgtactgtcttacgaaaaaattttgatgccatcctttttgaattaatgcattaaaaaaggtgttttgattattaggcaaagcagtggctttgggaatgatgacagcacgtaaaatcttgttttgaagtaaaattggtgattgcacatctgtttcgctatttaaattagtggttgcttgattggtcggcgtgttggttgtatcctgctgaacttgataatttgtagtgtcattagtactatcttgcttaaatagcttgaatctgtacttctgcacgcctttaacgtcaacttcatattcatgtcctgcaactaggttagtatttgcgggtgaataagttaggatcgttctaaaattgccgtagccacaggagctgtaattcttaacatgagctgcagtagtaacaactttagtatctaaatcagtgatagtaattgttggcttatttttaatggttctatctgataaatagagcgaccacatgatatttttcccttgaagcaattcaatagggaaaagacgcatgctaggataagcaactaccggctgactagcaggacgaaaagtatcattaatgtttagtactttttgaacggaatagcggtagccatttgtaccataagctgccccaatgcctgtagtggttaaacgacttgaaagtagccaagctcggtgaccggtatctgaaccagttaaattataatggtcagtaattaagtcagtgatcacatccccagcggtttgctgtgaaacattaaagtttaaatttgaagtttcagaagtgtctttagctagcttccaaacaaatttggagatattgcttggcttagtttcactaggtaaaccatgttggttaatgaatgggttagcattaattgcggccattacagcagccgtaatctgcgcgtttttattaagtgtatcagtagtcgagatagcgggcagactgaacaatgatcgatagtaattgatataatctgtttgcgttttaatgtattttggatctaagcgacctaccttaaattttttgcttagatttggctttttagcataaatatttgcggcactataactagttttatcaaggttcgcatattccttttgaaaattatgaacttcgttaacttcttgtgttgtgaatgtcgctgcttgtgtaacttgtccggcgagggggataaataaagttgcggcagcggcaatagaaaatttccgtagaagcattttagactcccttctatggttgtcagtatacctttcattataaactataaccaatgaaaaggctttagtgaaaaatattccactattttgcgcttttctggtattctttgcgtataattaaagattggaacatttaaaagaggtataaaataatgactaaaaaattacaagttggtttgatttttggtggtaattcatcagaatatgaagtatcaattgtttcaggccgcaacatctataaagcaatcgacaaagataagtttgatgtgcacccaatttggatcactaatgaaggctactttgctaatgaagaagaaagcttcaaggttttagatgatccttcataccaagttaagaacccacataaggttaacaacatttctaacttaattgaattagaaaacttgccagaaattgatgttttcttcccaattgttcacggtaacttaggcgaagacggtgttttacaaggtttgttccgcttgatggataagccattcgtcggtgatgacgtcttaggagccgctgtaacaatggataaggaattcactaagatcttggctcaaagagttggtgttccagtcgctgattggatttcaattaagcgttttgaatacgacgacaagaagaatgctaaacttaactatgaaaaggtagcagaaaaattgggccgcgacatgttcgttaagccatctaaccaaggctcatcagttggggttagtcacgtaactaatgctgacgaatatactgcagccttaaaagaagccttcaagtatgacgataaggtcttagttgaagaaactgttcctggcaccgaggttgaaacagctgtcttaggtaacgacaagccaattgtagcaggtgttggtcaaatcaccaatgcaaaaggttcattctacacttatgaaaataagtatgatgataattcaacttctaagttacaaatcccagcagatttaccacaagaaattatcgatactgttagagaaaatgcacgtaaagtttatgcagcaactgaatgtagcggcatggctagaattgactccatgctcaccccaggtggcaaggtagtcttgactgaagttaacgctttaccaggctttactaatatcagtatgtatcctaagttgtttgaagaagcaggtgttccttacagcgaattgattacacgcttaatcgaagcaggtatggaccgttttgatcataagaaaactttgcttcacaagcatgactaaacgccaaaaatatagaggtagatttcaatgacgactaacaagcatgattttgaagaattggctgcaccaaaagcagctgcacaagaattaggaattagtgttgccacgttaagaaagtattctttaatcgtggagaaggtgaccggcaagagcgactattttgctcggactaagcaaaaggctcgtctgtatcatcaaaaagatattgatgacttaaaggcttttcaccgtttatctaaaaatagtggcttaactttgcaagaagccgctcttcaaatctatgctgttagtgaaaagaaacctgaacctgaaactaaagaaccagctcctaagcccgcttataacagtaccgatgtaatggatactgagcaggtggttaagttgcttaacactttgcaaaagacaatttctaatcaaaatgaggcaattaattctttgcagaagcaattgaatgtcattcaaaagcaaaatcaagatttaattgaagcacaaaagcaattagctgcgccacaagatgatttagataagtttgcggctttgccagatatttctggaattgtgagtgcggatgaacctaaaccgaagagtgaagaagaaaagcgcgctgaagttaaaaaagacatgaataagagtcaagaacaaatgcatgacgagattatgtctaaggcaaaggaaaatgccaagaagcgggctacttcaaatgttcaccgtacactagaagatatgcaattaacggaccaaaaggaacactggtggcaaaaaatctttaagttttaaacaaattgattaagaatcaagagctgacctaacaaaaggccagcttttgttttacagtaggcgtataacaattaataggaagtagaagtaatgaaatttaaatggaaaaagcgctatacgatagcagttatcgtgacaattgtaggagcattattgacggtcttgtcctattttgccactgatatttaccacaaggacgacgttgccgtgattaccgatagcaagatcaaggatactttgattgaaaaaagtgaagatgtgtataaaaatgcggatgaaactcgccagcaaattttgcacttaaaagttttatcgggtaagcacaagggcgaaacttacacgactaaaaacgtgtattatccttcgcaattgacgacgcaaaagtatcgtgcaggtcagagaatttttgtcaatatcaagaagggtgatccagcgatcgttaatcctaagcgtgattgggtgttagttttggtagtgacaatcactttagcattgatggtggctgcagtagggaagcactcactctcgctggttgtgtcaatggtaatttcgtggctgatcttttatttgattatcatttgggatgtgcatttgaatggcgcccacattattttgctgtttggcttagctgatatcgtcttttcattctttagcttgctcattgtgcagggcttgaataaaaaaatgttggcgacttggttggcaacgctgctaggagtatttgtttcttttgccttgtgctacgtgatcatgaagttaacgggtgaatcggaaatgaaatatgagaccggtgactatgcaacgcaagatccacgaggcttgtttttagctcagactttgattggaattttaggtgcagtaatggatgaggcgaccgatattatttctagtttgtatgaattaattcaaactaaaaagaatattacgatgagacagttgattcatagtggtcgaacgatggggcaagaaattatgggaccgttgattaatgtcttggtcttaatttttattgctggtgcgctgccagaaactattttgtacttgcgtgataataatactttagcttcaacttttggctttactctgtcgctgggggcaacgcaaagtgtgatttcggcaatcggaattgttctgacggttatttttgcgacaggatgcagtttgttcttcttgaaaaaacgcgattggaagagtttgtttaaaaaagaaggtgagaataaatgagtacattatttgcattgatcgttgtcttagcgattttaatgacaatcgtcggtggtgaaactggaattcgtagtttttttagtgtgctaattaatacgattctattgatcttagtggcgatgctaatatcatggggaattaacattgcaattttgacgctgatttttattcctttaaagctagttacgattatctttttaggcactcatgactatacggtagcaaagaattcattttattcttccttcttagtgtgtttgattattagcctctttattttgggttgtcaatacctggctcaagctgcaggactaggaccagaggcaggagagttattggttggcttgtcgcagatgccgggcttgagttatccgatgattgccgtgacagtggcgattttctcaactttgggtgcaatcgcggaagccgcggtagcaatgagttcgggcttgctagaaatcaagaagcataaccctgctatcggtgaagaagagttgatggcttctggtacggttattggtaatgatgttttgggtacagcaatgaacacgattttatttgggatgttcggtagttttttatcattattcttatggtatttccgcttgcattacacgattggtgaagttttaaatgaaaaactttttgtaaatgaagcgttaattatcatgtattctttgattggggttatattaacagtgccactatcatcatttatgctatcaagaggaatgagcaagaaaggaccaaaacatgagagtagaaagtctgacgctgactaactttaataatcgtgaatatcaagttcatacatatgcgctagagcctaatcctgaattggttgagcaaaagcgcccgctagctattgtagtaccaggtggtagctttaatcacttatccaaaagagaaggcgaacccgtagccttagcatttaacaatcaaggcttcaacagtgtggtgatggaatataacttagtgcaagatccagacaaaatttaccctgatgcggggttagatgttctaagtactgtgaaatatttcagagaccacgctgatgagtatcagttagataaagataagattttaacagttggcttttctgctggcggtcatgtggtcagtgtagctaataacatggctttaaataaaaattatcagacaaagtatgattttgataagactgatgttttacctaataagacaatcttaggctatccgctgattgatattaaaaagattggttttccgattccagaagatcaaaaagcaaaaatgcctgtagaggaagagattttggatagtgcattaggtgttacacgtgaaacgcccgatacatttattttccaggcatgggatgatccggtggttttgatcggaaattcgattgaatatattggtgctttgaataagaataaggattcagcagaagctcatttgtttaaccacggttaccacggcttttcattggctcgtcacaatgtggaaactaaggggcaagattggcaggataatccgcacgcggcgcactggttcaacttggcaatggaatggctaaagagtgagtggggcgaatgatgtgaagcataaaaaatcttctaaccctaatgacaatatctatcacactatcgtcaagaatagaaaaattgaccgaatgattatgccttttgaagcggtgtactgcgtgtggctaatcattacgctggttcttagctttaagctatttgcttattcgattgacgcacaatttgtgctaatttctctattttttcttagcgggtgggtttcgtcattggttaagaatcatcgcatgaagaaaagtagaaaataagataagtaaaaagagttctcgcacgagaactcttttttattagaatcatttactttttatctctaaagaaaataacttccttagcagctacaaatggtccagatgacttgtaaacctttaatctaatagctttggcatcgacatttcttaagccaacaaccttattcttgctatcagacttccaagtcaagtgatcgccgtatggcttaaagttaacgccatcgcttgaaagctcgacactaacttcaacaggatcgccttggtgatcaatctttctaggtacccagcccattcgactcaagtgttccaaatgattaaaggtgaagtttaattcaagtggcttgtcttcgctgaccccatcaatggtttcccattcacttgctaacttcaaatcagtcaagtaatcaattggatgatccttaggactagctagactgctcgtgacatgaatgtcattaattgcatagttcattggatcgggcttggtaattgcgccaaacggatctgaccattctgaaactttgttgccagctacataacgcaaacgcagggtgtagcgggtatttggcactagttcatggaaagtaaatgaattaccatcaatgccatcatgtaaaatgccgttaacttcgatttgaacttggtcggttaattgcggccaaactactgttaatgaatgagagctaatcttgtctggatcaaccattggttgttttggtgaacgcaacagtgaatccgtaatagcgtgaaccaaagtttcattgccatatctgaagtttctgatcgtaatctcaattttagaatcggtaatatcgcgtttagctaacttaatttgtaaagcagtttgtttcttttcttggtattgatcaaattcaggcatccagctgtaatttgtgttaaagaagaagccttccttagcatgggcgaaggtatcaacggtaccgtactcctgcatcgggatttccttgtcgttgattttaacagtcaaaccatcaggataaccgtcacacatgatgttcaagttggtggtgttttccgtttggaaagtattgaaatcgccttgagttgggtcgatggtgatcgtcaatttgcttgcttctaaatcactcgtgatttgtgtagctacatggtttcttgaatagtcgttatagccgttatcatcgtaagtaaccattttactcttgccttgagggtagaggacatagttgcgttcgccgaggtcaaaaatagcgccgcctcgtacaaatactggtaaatgccaggatgggtaagactgcttattataaacgcgtccgcccaagtactttttgccatcaaataagtcaacccacattgttctgtggttaggcaagtaaaggttgtcttttcttgaattgccattaccatcttcgcgaccgttaacaattggcgaaatcaacaagttaggccctaacataaattcatggcccacctgtggggtgtagttgacttgttcatgtggaaattccaagaataatggccgcaagattggctcaccgacttgagcgcggtagattagggtatataagtaagtctgcaattgctcacgtagttttaaataggctcgattaatttgcgtcatcttactattgtaagcaaatggggtcttactaaatttaccttgatcgtctaagttgaacaggattggggtaaatgccttccattcaaaatcacgaatggcaatttgagcattaccaccgccagcggtaccgtcaacggcactaccaactaaaggctggcccgaaaggctagcccccaaaaagccagcaacttgtgttggaatgttttcccagttgccgccaatgtcaccaaaggctagcattgttctattttgactaccagcaataccagtattagagaaaatcaacggccgcttacgcttcaaattgttgcgtaaaattagcgcatcatttttcaatacttttggatcggttgtgtccgtttgaataaaggtggtatcaggtgaagccttcggtgtgttgttttgactccaaagaccagcgctaacgtcatgtatagcggcgtattcactgaagctagccatggcttcttcgttgatttcttgcacatcatagttaggcacgatccaacttaatttaaaatgctgcttctggtagcgatcaaccattgcccgtgctgagaattgatattcttcttcgccattcaaagagcccttgccactagcatcttctggcttgttagttctggtgtaataattaccgtcttcaaacataacagcattacgttccttagctttaccaggctgccataaggtagttaaaaagttgccaacatgacctaatcctagtgcatatttaggtggcatcagcggcttacccgttaacatgtaatactttgccaaaatatttttgggtgaattacctaatagataaaaggtatcaaacatgttggtgtcgtgctttaagatagtggcatccggattgcttttaccaaagtcataattgccagcactctcagtattgcgcaattcaccaaagccggagttagcccagaagaatggcacttgggtcaaaacgccgcctttaccggtaatcttgtcgcgcttgattgaaatgatttcacctttatgactgaagtagccgttctgcatcccgccaccaaagtaaaattcattcttgtgttgcttcaaaatttcggtagtttgatcattgcctaattcaagtggactcagctgaaccaaacgattgcggtgcagcgtctcgtcaaagatgctcattacggctggcttttgttggaaaataagttgataattgccagacttaatgattaaggaatcgctggttgccttaggctgtgatttttcaaaatagtcattgttgaattgagacaggtcaacaaaagatgagtgattctcgtcaaacttcttagctggatcgagaaaatatctgaagatcccgtcagctaaaatataaagacgaacaatatcgccggtggagtagtgaagttcataataatgatcacgtttgttggcaccgataagttggcctagttgatgtctttctatttggttttgtgtcatatttattcttcctatttaaacttgctaccttatattataactaaaaatcaaaaaacttcttaagcaattgtatttactaatatgcatcaacaaaaaaagctctgctattatgcagagccaccgcgcgtttgcaagttatcgtcttactgcgcatgcatccatgatcattggacgcgacaatcttcctatgcacattatagcatgataaaaatacgatgcttaaactggtatttaccaattttgttagatataattaaattaacaattacgatttagacatataaagaaagaagatatttatgacttattacattcatgcagataaatttttcttagaaaacagaacagaaaacggcggctatcttgaagttcaagataatggcaagtttggctttttctatccagaaagcaaaaagccagaaggtaagattgtcgattatgctggcaaatgggttgcaccaggattagttgatacccacattcacggctcattgcgtgaggatgtaatgaagagtgattgggaaggtattaataagatctccaagggcttgcttagtgcgggggttacttcatggatgccaacaacgatcactgctgcaagcgataccttaactagaatttgtaagatgtttgcggaccatcaaggacaagaagaaggggcaaagattcaagggattcactttgaaggaccattcttcacggaagaacatgctggagctgaaaatcctaagtacatgatggatcccgatattaatgaatttaacaagtggctggacgcttctaacgggatgctgaagaagatttcaatggctcctgaaagaaaaggttccaaagaatttattcgtgaagccgttaaggaaggcatagtagttgttttgggccactcaagcgctagttttgaagaagcagtcgcaggcgttgaagcaggtgcaaccatgtttactcatacctttaacgggatgcctgatccaagccaccacacgccatcaatttctaatgcggcaatgacgcttaataatgtgaccgatgaattaatctgtgatggccaccatgtgcaaccatgtatggctaagactttgattaatgcggttggtcctgaacacattgccttgattactgattgtatggaagccggtatgatgccagatggtgattacatgttaggtgaattgccagtctatgtaaaagatggcatggctcgtcttaaggatggcgacaatttggctggatctatcttgcaattgaagcaagccgttaagaatgtagttgactggaatatcgttactccagaaaaggcagtgatgatggctagttatgttcctgctaagagtgcccatatcttggacaattgcggtacaatcgcaccagataaggatgccgacttcttgattttgaatccagatttgaccttaagtgaaacttacctaaatggtgaatcacgttataaggcttaatttgttagtctagttttaaatagtcctcattagattgagggctattttttgaccctaaattttggcaaatagtatacaattaataatagtaaagtaggtattatacattaggagaaatttattatgccagatggagactgtaaaatagtttgtgtaaggatgaatgattccttaaatttatttctttaaacattagaaaaaggagttcctttctcgtatgattggtttgaacaaaaaaaacacatacagaaagaagaactccttcatgaatgattttaccaaagattttgctcaagctctattcaatccagacaaaataaatgatttattgcgcaaagaactacaacaggctgttaataacttgctagaagctgaattgactgcctttctgggctatgatccctatgccagaaatggctggaatactggcaactctagaaatggtgcttatttccgcaaagttgatacgcaatttggcccaattgaagtgcaagtgcctcgggatcgcaacggtcaatttcatcagcacacgctgcctgactacaagcagcactcggatatcttggaaagcatgattatcaagctttactccaagggcgtgaccaccagggaaatagccgatctaattgaaaagatgtatggcagccattacagtccagctcaggtatcaaatatttccaagcagatgattccaaaggttgaggcttaccacaaacgcaagctaagcgacaagtttttctgcgtctatttggatgcgacataccttcctttgcgccgagaaacgtttgagcgtgaagcagtctatattgccattggcattaaacctaatggacataaggaagtcattgactactgcattgctcctagtgagaacattgaagtctggacagagatgcttcaaaacatgaagtccagaggcttgaagcaagttgaactctttctttctgatggtgttgttggcatgaaaacagccttggccaggacttatcctaaagctcattttcaacgctgtttggttcatgtcatgcgcaatatctgcgctaaagtacgcgtcgacgatcgtgaaaagatcatgaacgaattcaaacaggtgcatcaacagacaaacaaagaagaagccacagctgtcctgcatgacttctataccaaatggggcaaggtttacagccatgttatcagaagcttgaaagacatagaaccagatctgctggtcttttataactatcccaagcagatcagagcttcaatttattcgactaacatgattgaatcatttaacaatgtgatcaagcgcaaagctaagcctaaggcagagtttccaactgaacagtcgcttgatgcttttattggtattcaggcaatgagctacaatgaccgttatttcaatcgaattcataaaggctttggtcaggttcaggacaccttagaatcctactttgattaaataaataattaaaaaatcaatttacgagaaagaactatttacacaaaagatttgacagtttcgccagatggaatcagtcaattactagtactttttatgtaataactttcaattaattgaataatttgtactcttattgattaaagaaaagtatcacatatgtttcatgaatctcgtctagccaagtaggtgagattttttattacgtttctatgtaatcgctttcaattttaaaacaaatgtgctatattatgagtgtaaagaaattaagaaataaaaatattaaataagtttaagtaaaaggagagaggtgagttccgatgggcacttgagagtagaaagtcatatatatagaaaggtttgtgataccaatgggcatcgtaaattgaaaataaaatgtagttcaataatcatcaagtgatattaatgtacataagaggccgtgaaattattagtaggcatagaataataactatttgatgaatcacttggattaggattaagaaagattttcatacatgataaatattaataagaaatgacccttcgctggaatgaagtatgcgaagggtcatttaattttggcttgaaaaacgtttggtatttagcattattgttatttgttaaatataatatgaagtacatgtactaggccgatagagaggaaagttatgacaacagactcaattaattttaaaatcgatgcagaaagtaaaaaggtgatgattaaagaattagcaattattaatggcttaattcctgatgatgataatacagtagataatctaaatgattattttaaaaacttaggaatttaatggtttattggtcttttatctgatgtagtaaatcatgatttagtaagtcgtaatttagtaaaatataatttagaagatggtgatcttatgtttattggacgaaagaaagaacttactaaattagagcaatttaattagcgtggctaaaagatattactacttaaacttcccacacgcaaaattgcttgtttcattgtgattctgcgtgttttgacaaatataaaaggcacaagtccttttcattgctataattatattgaccaaaacataatttatttgcatgaaaggcttgtgccaatgtctattttaccatctcctgaccaacaaaatgaacaactattttcaaactcaatcatcagcttcatcaagaagtttcaggtgatcaagctgttgagaaaatgtggcttccgcaaggaaaaaggcattagcctgttcagcttgtttctttacgttttaagcaatgtctttcgtgaccgcagcttatatatgcagctgaaaatggatcattttcaagaaaatttttccaagaactcatattaccgttttatgcgcaacgttcacgtcaattggctccacttcaccacacttctgtctgcgcaaatcattaataaccacttgcgatctttgacttcagaaaaacgggctgattgctttgttgtcgatgattcctacttctctaggaccggcttcaagaaaacagaattagtcgccaaagtttttgaccatgtatcaatgacttacaagaaaggttttcgcatgatgaccctgggctggactgatggagcttctttcatgccaatcaattcagtgctgctgtcttctcagaagctacagaatatgattggcgaaaataaagtttttgatcagcgcaccattgctggccaaagacgtatgcttgcccggactaaaggcacagacgtgatggttaatttaatcgaccaagctatgaaagcaggtcatcaagccaagtacgtgctgtttgacagctggttctcaaatccacatcaaatcgtccagctcaagcaaaggaagctggatgtgattgccatggttaaggttagctccaaaatcaaatatgaatttgagggagaacgcaaaaacatcaaacagatttatcgcagctgtaaaaagcgatgcggccgttctcgctacctgctgtcaatcccagtcaaagtcggacgccaggacaaagacggtgctaaaatagatgcacggattgtctgcgttagaaaccgtgccaatcgcaaggattggctggcaatcatttgtaccgacatgtcgcttagcgaagatgaaattatccgcaactacggcaagcgttgggatattgaggtttttttcaaaacttgcaaaagttatctaaaactaagtacggaatatcatggcctgtcttacgatgctttgaccgctcatgttgccatagtttttactcgctacatgcttatgtcagttgccaagcgggacgatgaagatgaacgcacgctaggcgagctgttctattgcatgattgatgagctggcggacattacttttagccattccttgcaattgattactgatgcaatgctggccagcgtaaagcaagtctttcatgccagtgaagcacaaatagctgaattcacggctgactttatcaatcgtttacccaaatacatgcaaaaattgttaaagaaaactagcaaaaataatatagaagcctaaagccaagcaagatcaagagattactggcttatttagtgtgggaagtttaagtaaatataatttattcaagacatcataaagagcatttacatgaagttgacagtatattcgaccatctttacctcgaaaaatattttctgattcgggattaaaaggttgatcaaaatcagagccatcaatcgcaacaactaagtattgattatctaataattgcagtacattatttgcccggctaagttctaacataatttctttaaagcattcaggctttaatttagccttttgttgttcaaaagccgaagcagtcattctagaatttatgtcaggaaaagcatgaaaaatttccgaattcaggctgccagctcccatgttaagaattaacttaatcaaatcagtggaattgagcttacgacagcgagtaaaagcttgatcagatacagagaaatcgtgaatgttgtcagcgattttattgataatactatccatcagctttaaaatatttgagtgaagggatttcataagaggcacagctttctatgaaagaccagataatatgacgaaagtgagcagaaaggcaaataaactctgctcactttttattttaaaaagaaaaaagaccgaatcaaaatgattcgatctttaaaagctgtcgatataatgtcaatgtcttaacttaatgacattgacttttcgtcttcgctttctttaatattcaaattttgggaattagactaacttctttctgatccaaccagaaatccagtcgatgatcaccaccataatgatgatccctagcaaaatgataccaacacggtcccattgacgatattgcaaagcaataatcaatggataaccgataccaccggcacctaccaaaccaaggatagatgcggaacgaatggaaacatcaaaacgatacaaggtgttagaaatcaaagctggcatcaagttaggcatagttgaaaacatgattacgtggaacttagaaccaccggctgcaataacagcttcgtttggcccttcttccaagttttcaatagcttccgagaacaacttggcaagcataccaactgagtggaaacctaatgccaaaacaccggctgcagaaccaggacccacggccttgatgaacatcaaagcaagaacaatttcagggaatgaacggataattgccaaaacaattttaccgattcttgaagtgtaccaatgcttgtgcttggtgtgagctgcccagaaggcaaatggcaatgaaataattgcggaaatgaatgtacctaagaaagcgatacaaatggtttgccacaattgtgagaccaagtcttcacctgagccattgtaaacatagctccagtcaggatggaaaatacctgagaagattgcaccggcaatttgaccagcagtggctttaataccaccgaagttaataccagtacatgaccaaacaataattacgatagtggcaattgcaattagccaatgtgcaacttgtttcttacggtcaacgggtttagcgggtaattttttcattgtagtatccattatttcattaactcctcccgtgacttagatgaaacgtagtcgatcaagacaacaactacgataataacgatgatgatcgtaccagtttgagcgtaattgaagacctgcaaagtttgttgcaagttcaaaccaataccaccggcaccgatataaccaaggactgttgatgctctgacgttgatttcaaatgcatatagaacatatgaaatgaagtaagtgataatttgtggcataactgcgtaatggataatttgcaatttgtttgcacctacggcagtcaaagcttcaattggacctggatcaattgtttcgattgcttcgtagaacaacttaacaaccacaccaaaggtgaagactgctaaagccaagataccagcaactggaccgatacctacgatagctacgaagatcgcaccaagaagcaagtcaggaatggttctgacaatgttcatgatcacacgaagaatgccagtcacagccttgttcttaacgatgttacgggcaatcaataatgagtagataaatgcgacaacagatccaattaccgtacccaagacagccatcttgatggtttcaatcaacttaggccaaacaacgttcaagtagctccaatctggatgagacatttgaataaagatgtcagcaaattggttccagttttcaaacaagacactaatgtgcgtgttagtaacattgattgaaataaatagtcctgcaatcatgatgattgtccaaaccaagttcattactttgaacttacgcttaggcaattgatttacttgttcaggcattattcatcctcctcgctgccgttaccaccattgtaaatattagtgaagacagacttaggagtatctttcatcttgccatcgtaaactacttgaccagcacggataccgattactctttcaccaaattgttgtgcaagttcgatactgtgcaagttagcaactacggtcatgccgtatttttcattaagcatcttcaagtcattcatgactctcactgaagtctgtggatcaagtgatgcagttggttcatcagccaagatgatctttggattttgcataagcacacgtgcaatagctacacgttgttgttgaccacctgataactcgtcagcacgtgcataaactttatcggccaaatcaacttgttgtaaagcttcataagccttttgtttatcttctttactgaataagttaaaagtagtcttccaagttgggtagtaagctacgcggcctaccaaaacattgcgcaaaacactagaacgcttaaccaagttaaagttctggaaaatcattccgatatcgcgacgtaatttacgcaaattcttgcctttagcacttgtaattgatttgccgtcaatcaaaatatcgcctgaagtaatatcatgcaaatgattgattgaacgtagcaaagttgacttaccagcaccagacaaaccaacaactactacgaattcacctttattaatagttaagttgatgccctttaaacctacagtaccattgtcgtagatcttggaaacatcttttaattgaatcattggcttatctgccatttaatcgtcaaactcccttaattaaatttattatttcttagttgattcaacgatcttgtcgtatttacggataacgttgaagtcactatcttttgcgtatgcgtaaccttcgtggctatatacgctttcgataactttcttaccttcctttgacttagctacagagatgaatgccttagcaagcttcttacggaatgacttagacatacttggaattactgagatagtgtcgttaggaattggcttagtaaagtaaattggaacaacttgactcatgatctttgggttgtccttcttaacgatgttacgtgcatcttcaaagacgaaggctgcatcagtatcgccgtttaatacgttcaaaacagcttggtcgtgaccagtaacagtaactaacttacaactcttagttacgtccaaacccttttgcttaagttcagcaactgggaatacgtatccagcagatgaagttgggttttgtactgaaattgacttaccctttaagtctttccagttcttgatctttgaacccttcttaacaaggatttctgcacgatagctctttactaattggttagttgctttaccacctggttgcttaacaccgtaacgttcagcttgcaaaagcaaatcggctgcgccttgcttgtgagctaaaacataaccatctggtggaagaaaacctacatcaactttctttgatttcatagcttccacaacggtgttgtagtcagttgacatagaaacgtgaactgggatacccaatctctttgaaagcatcttttcaagaggctttgcacgagcttgcaacttagttgcagcttgacttggtacaaattgaatagttaatgactttggggtataaccacccttagaactattactcttgtttgaacacgcagttgcaactactgctacaagaagtgcaactactgctaccaagattcttctaaatcttttcattatgtcctccataaacataaatacacagtgataaaacaaactactctacatcacaaaaaaagacttaattacgggtcgccaaaggcgatcaataattaagcctaattaatgacgtttctaataactaaacgaacagaaaaaacgtctttacgagcgaaagacacatcctttgcaataaattgttctgattgcataaacattatctttcactcccctttttcgttcccacgttcatttgataaaataataccagaaacattcgtgttctatcaaggtattttgcaacttttttcaaaaaaataatcgccaatgaatttagaatcatttggcgattattcttatattagttctttttcatagttggcttaagaggattgtttcccatatcggttttaacaatcaaaacatcagctaaagcatgttggtttacgtattcagtaactgaacccatcaacattctttcaactgcattcaaaccagtagcacccatcacaattaaagtattgtggtggtccttaatgaagtcgtaagaaataatgcgcttaggactgccataacgaatgtgataatcaacatcgtcaaaaccgaagttatcgtgagcccatttcttcaaactcttcaagtattcttcagaatcttgaagagtttggtaaatggtatctcctgaaatcaaagtgtcttgcatttcacccataaattgacgcgtatcgattacgttcaatacatcaacatgagcaccatcacgcaaaccaacttttacagccttgtcaaaggctctttcagctgattctgagccatcaactggaactaaaatgctttcttttgttttatctgtcacgttaattcatctcctataaattgcactagtacttaccctttattttagcataattttgaaagccgttactttttaattgattgtttgcttgaagatttgttgctaaaataatattcatgacattcattaacagaaaggggagaatttttttgactaaaaaattaactaatcaattaatcggagtaactagtggacgcaacttccgtgaacttggaggctacgaaactatgtctggcaagaaaatcaagatgcacaagttattaagaactggtaacttagccgatctttcaccattcgacaagcagtttttgactgattacggcgttaaatacgatgtcgacttccgtagtaaagaagaagttgataatcaaccagaccgtgtcccagacggcgtagaatacatttacgatcctgttttcagtgaagacttaaccaattcatccaagagtttaactgacttagatacacaagcacacgacgacgctgattttggcttcaatcacatgcattatgcttacgaagacatgatcgaaagtgaacctgcacaaaaggcatatcgcaagttcttcgatgtcttgcttgaaaatacggtggatggcgaaagtgttattttccactgtactgcaggcaaggatagaaccggcttcggtgcattacttgcattatctgctcttggcgtaccactaaatacgattaagaaagactatcttttaaccaacatcactaccaaggatttcgtcgacagtatggttgaacatgcccgtcaaaatggtaaaaatgaaaatgtgctgcaatcgattcgtgacattcagagtgtccgcagtgaataccttgaccatgctgttaaagtactaaacgatgaatatggcggtattaataactacctacgcgatgtaatgaagctctcaagtgcagacatcatgaagttgcgtaatatttatcttgaagattagaaaaagaaggctaaaaactagtcttcttttttcttaccaaatttttgctctaaaaaggcataaatcgcgctaggatcagtaaaattaaaaacttcgcgcaattcgttggctggcgtattagccaaaaaatccatcacttgagctaataatgcagcttgcccatctgggtcattatctaaaagcatgaataaaaatttaacttcaattgcttggctaggattaatcatattatgaaaagtgactggcgttttcagcgcaaccggaacaatcagtctcgtgttaacaaactcgccctcggtgtgtggaatcgcaatattaggaatatttttacctagtgttgcagtatccaatcccgttggaaaattatgctctctttcgacaatatggtgtaaaaagtttcccttaacatagccactttcgcgtaaatgctcgtaaacttctttaaaaaccaaatcttgcttagtttgattagaaataaatactgcatcaggtgcaaaaagattttgattagtcattggatttttccttactaatgtggaattaacattttcaccataagttaacaagacgtttttttcaacccaaaagatggtaaagttaaggtaaatcatttttaaagggagaaaaatatggcaaagacaaaaactttatactttggtgccggttggttcaacgaaaagcaaaataaggcttacaaagaagcaatggaagctctaaagcaaaatcctaccgttgacttagaaaacagctacgtacctcttgataatcaatataagggtatccgcgttgatgaacaccctgaatacttgcacgacattgaatgggcatcagctacctaccataacgacttagtagggattaagtccagcgacatcatgcttggcgtttacttgcctgaagaagaagatgttggtctgggaatggaacttggctatgccctttcaaaaggcaagtacatcttgttggtaattcctgatggagattacggtaagccaatcaacttaatgagctggggtgtttgcgataacgcaattaagatcagtgaattaaaagacttcgacttcaaccgccctcgttacaacttctacgacggcgcagtttattaaataaattaagcagacatactaatatagctaagcataactaaaacgacatcgctaattatctagcggtgccgtttcttttttcagattacctaaattcatcaaaaaagattccaagaaccttttctaacttttaatcctcaattctttctctaccttttgatctttgttctaatggatcatatcccaaatcttcaatctgcaatcttttttctttagcagacatttttgatacttcgtcccaaaaattagttttttcttttttcatttcaagattgccattaggctttagaattaacacaacattatcgccttttttaaacaccagtacttactccgatcacaacagataaaaataataggaaaaatgatattacatttcatcaaaactaatcaacttgcaccccacttgttctgccagttccgtacatgaatccgtaaagcctgactttgaaaacaagtagtaacttaaacttcccacactaaataagccagtaatctcttgatcttgcttggctttaggcttctatattatttttgctagttttctttaacaatttttgcatgtatttgggtaaacgattgataaagtcagccgtgaattcagctatttgtgcttcactggcatgaaagacttgctttacgctggccagcattgcatcagtaatcaattgcaaggaatggctaaaagtaatgtccgccagctcatcaatcatgcaatagaacagctcgcctagcgtgcgttcatcttcatcgtcccgcttggcaactgacataagcatgtagcgagtaaaaactatggcaacatgagcggtcaaagcatcgtaagacaggccatgatattccgtacttagttttagataacttttgcaagttttgaaaaaaacctcaatatcccaacgcttgccgtagttgcggataatttcatcttcgctaagcgacatgtcggtacaaatgattgccagccaatccttgcgattggcacggtttctaacgcagacaatccgtgcatctattttagcaccgtctttgtcctggcgtccgactttgactgggattgacagcaggtagcgagaacggccgcatcgctttttacagctgcgataaatctgtttgatgtttttgcgttctccctcaaattcatatttgattttggagctaaccttaaccatggcaatcacatccagcttcctttgcttgagctggacgatttgatgtggatttgagaaccagctgtcaaacagcacgtacttggcttgatgacctgctttcatagcttggtcgattaaattaaccatcacgtctgtgcctttagtccgggcaagcatacgtctttggccagcaatggtgcgctgatcaaaaactttattttcgccaatcatattctgtagcttctgagaagacagcagcactgaattgattggcatgaaagaagctccatcagtccagcccagggtcatcatgcgaaaacctttcttgtaagtcattgatacatggtcaaaaactttggcgactaattctgttttcttgaagccggtcctagagaagtaggaatcatcgacaacaaagcaatcagcccgtttttctgaagtcaaagatcgcaagtggttattaatgatttgcgcagacagaagtgtggtgaagtggagccaattgacgtgaacgttgcgcataaaacggtaatatgagttcttggaaaaattttcttgaaaatgatccattttcagctgcatatataagctgcggtcacgaaagacattgcttaaaacgtaaagaaacaagctgaacaggctaatgcctttttccttgcggaagccacattttctcaacagcttgatcacctgaaacttcttgatgaagctgatgattgagtttgaaaatagttgttcattttgttggtcaggagatggtaaaatagacattggcacaagcctttcatgcaaataaattatgttttggtcaatataattatagcaatgaaaaggacttgtgccttttatatttgtcaaaacacgcagaatcacaatgaaacaagcaattttgcgtgtgggaagtttaagtatttagacatggttatccaacccagacaaaaaatggatgaacgtgaggcagccttaactatgttaaagaaattagcccaacaagaaaaagatttcttagtcctgatggatcgtggctatattagctttaatttaattgaaaattgcaatcgattaaaacattgccactatgttatgcgatcaaaatccggagatggtgcttttaaagaaattgtagctatgtcgaatcatgaatacgatattgacttatcatgcagagtaacttcgtcacattattattatgtcacccataaagatacagaaaagtttcttcacctgattcttcacaaaaagcatcactataaagctgttcgttcaaaaaataccagagatcaacgctgggattttgaggatatgtgtgatgttagatttagagtttgtaagtttagaatcaatccaccaggttcagacgatgagtgggaagtcctcatcaccaatttatatcgaaatgaatatcctctagctagaatgaaagagatctatcatcttcgctggggaatagaaacttcttttagggagcttaaatatgacttaagcggcatacagtttcattctaaaaaagatcaatttgtttatatggaaatatacgcccattttgcaatgtataatgccgtgagtttatcaataattgcgagctcaaaaccgtatactcagggaaaatatcaatatcaaatagattttaaaatggcctgttgtatctggcgacgatattttagtataagtgataattcagataaaaacttcacacaattactgctggatgtggcattttatttaacgcctattcgaccaggaagaaaagataaacgaaatctaaaagttaaattagtagttggctttccttatcgtctagcagcttgaactaatttaaacgactatcttaagatggcttatttgtgctatcaaaaaagacatttatcgaataaaataattcgataaatgtctcaaaaagtgtcatcagattagtcaatgtcttaacttaatgacattggacgaaaagtccccgcttttttgttagccgtgaaatttaaattggcattgattaagatgatcattaattaatccgattccctgcaagtaggaataaatgactacaggtcccacaaaggaaaaaccatcttttttcatttgtttggatatcttctgcgataggtcattagaagcgggaacgtcatcaaagctggcaatatcatgcacaattggagtaggtacaaaattttgtaaatatttggcgactgaacaatatttttgttcaattgccaaaaatgcccgagcatttttaacagcagcattaattttcattcgattacggataatgcccttgttttgcattaatgactcgatatctttatcggtcatctttgcgacttcagagatctgccaatttttgaatgcagctttaaaattgttgcgtttatgcaaaactgtggaccagcttaaacctgattggaaaagttcgagcacaagcatttcatacaaatgtgactcatctagattaagtttgcaccattcatgatcgtgatactcctgtactgcttcgtcttttgtatcgccccatggacagcgaataatttcttgattcatatttttctctctttctatgtaagtaatgttttacccctctattatttattacgcaaaaaaatgcgattattttttgagaaattatatttttatgtgcgaaataagggttttaacagctttttttgctataattaggtgtgaatttcgaggaggatcctatggaaaaattagataccatgatgttggctgatgatttagccttatcacaagataaaattttaaatggcgaacaagactttggcgctgaagctgtttacaaagtaatcgataacttgggcgttttaaataacccaatcaaggattacttcgacatgactgaagaacaatattatgaagctgaaagcgatcacaaactaactttgatcaagatggacagtaagttgactgatttgcatgatcgcattttaactaaccatgttgatggttttgttgataaggacgagatcaacttgacctacaatcatgagaatccatatgaagatgatttatacgatccaactactgattatcgtgaaattgtttacagcttgaaagttattggtgcggttcaagcaattgcagctaaggacttgcaagaagtattgtctaaagatgctgtattatcaattggacttgccgcatatgctttagcacacaacgcataaattatttgagtcggctggtaagcggccggctttttttgcttttttgaggcgaaaagatgaatttgtttaaacacataaagggaatagttgatcgaatcgttggcgccaaaaaacgctctgcaatggataaagatagtgaattgcttgatccgatgcaaaaatatactactgttggagaatatcatgttggtgccgttgatggtacgccgcatggtaaggactatgttttaaccgtttatcaagacgaagacggcgttttgcgacaagcacttagtccagagagtacaacgaaattagcaccggaatatttacgcaagtataatgcggaactaggtcattttcgtgcctttcataataagaagacagggcgccgttattgggtggaaaattacttggataatttcactacggaagtgaaaaagcatattcgcccaggcactaattcggtcaatatcggtgtaattacagatactcactttaaagataaagatagcagcgatttttatggctttaatgggctgcaacatgtgcaagaattttcttatttagatcaatctggcttgctagatttaaaagtccacttaggtgactggatcgatggctccgatgctggcctggtcagtgaaagtgaattggtcaagctgaacaagtcttttaagtcggatcaggtgccatatttgagtatcaagggtaatcatgatgaaaatgataagtttgatgaacatcatgatttaaaagcctcatttccagaaaatgaattcgaaaatattatgtggcccgatatgtaccggcaacgaggaattcattatgtttcgcgccagcacggggtggcatactttgatttagatgacgtgcgggtgatttcagttaatacgtcagatgttccatatgaattaaataaccgcgggcaaaagcgctatgacaataagattgtattggctgtgcgtgaagatcaaattgaggaaattatcgaaattttggctaattcttccaacaaaaagatcatcttcatgtcccatgccaacccaattaatcgaaaggggtctaatgcacttaagtataatggccgctctttgcatgaactgctagttgcctttaatcaacgtgaaaaaggtcgaatgcacgctagcaatggtgttccaacagaatttcgtttatcaaatgattttgattttaccaatatcaagaatgcgagaattattgcctacttctgcggacatcggcatcgtgaagaccagtatcggatcaacgggattcaatatattttgtttaactgttctgccttgatggggccaaatcattcgctaacaactaaatacaacaaaaacttagaccgaagaattgatcaaaataatgaatttgcgggttatattgtgaacgtcgatttaaaacgacaccgcattcaatcctttggctatggtgcagcttctagacgccgggtgtatttcatttagttaaggaatagtaaaggtatttggctattacaagtgtttagcttataataaaaaggttaaagtaaaaaatagtgaatattatagcaaatattaagatttagagaattgacttaggggaatttaaattatgtgcggaattgtcgcgttttatgatccaaagataaatgaaaagcaggctgtcattggcaaaatgatggccacgattaaacaccgcggacctagttccgacgggtattatactaatgacgaggttgcccttggttttagaagattatcaattattgatcttcgtgggggtagccaacctatttataatgaagataaaactagagcaattatttttaatggtgaaatttataactttaagccattaagagaagaattaattaaagcaggccatgattttactactaaggctgatacagaagtcttacttcatggttatgaagaatggggcatggatggcttgcttaagcgtgtacgtgggatgttcgccttcttaatttgggatgacaacaacaagaccctttatggtgcacgtgacttctttggcattaagccaatgtactacagtaatcaaaatggccatttgttggttggttcagaattaaagagctttttggaatttccaaagttcaagcgggaattaaatgttgaagcagttaagccatacttgatgaatcaatacaatgacctagaagaaaccttctttaagggcgtttaccgcttcccagcgggccattggtttgaatacaaagatggtgaaatgaagacccatcaatattgggatgctgaatataaagaaaatagcctttcctttgaagaaactttgcaaaagatcaacgaagatttgaaagaaacggttgatttgtatagaaacgctgatgttaaggttggtgctttcttatcagaaggaatcgactcttcatacttgactagtttgcttaacccagatgacgttttctcagtaagttttgatgattcaacttatgatgaagcttctaaggctaaggcattagcagatattaatcactggaagttcttcagcgataaggttgatgctgatgaagcaatgcgtgacttcccagaaatgcaataccacatggatgaaccagatgctaatccgtcaatcattccactctggtacttgtgtaaactagctcgtaagcatgttactgttgctctttcaggtgaaggcgctgatgaattgtttgctggttatgtgaactacgggatgcatacgcataacgacattattaaggtctttacttcagaattgaaaaagttgcctgagaagaagcgggttaaattggcacacaagattaagagaatgcctaatttcccaggtaaagttcacatgtacaccaatttagctgaaccgagtgaattttatgtcggtcaatcggttatctatgacatggattacccaactatctttacttctaaagatgctaatagcattttacagccaacgtatcgcaataaattgactgttaacggcatttaccaaaaagactttaagaaagtaaagggagtcgataatgttaagcagatgcaatacattgacttgcaccactttatgcttaacgatattgaacaaaaagctgataagatttcgatggcccattcacttgaagttcgtgttccttacctcgacaagaagattgcggaattggctaactctatcccaaccaagtacttggttaaccgtcatgataccaagtatgctttgcgtaaggcttcagaaaaagttttaccagatgagtgggctaagagacctaagcttggcttcccaactccaattaagcaatggttgaaggaaccacgtttttacaaacaagttcatgctctttttgaagaagaatttgtcaacgatatttttgaccaaaagaagattatcaagttacttgacgacaactatgaaggtgatggctcacatagacgtcaaatctgggctatctataccttccttgtttggtacaagttgttctttgttgattacgaaaacacagttaagaaatatcaacacgtgcaacctgaagttgctaagctaatttcacagggtaaattactataattctagggagattttttgaggatgagtaaaaaatttacgccgatcttactcggtagtgatatcaacgtgtatggtatggcacgttcatttaatgaagcatatggcattaaagtgaaggccttagctgacgttcaacttgctgctactcgttattcaagcattgtggacgttgaattgcatcatggctttagtagcgatcctacttttatggacgtgatgcacaaaaagatggaagaatacaagaatcacgaggagccagttatcttgattgcttgtggtgatggctatgctgagttgctttctaagcaccaagatgaattgaaaaaggtctttatcgttccttacataaaatatgacttacttgaaaaattaatctctaaggaaggcttttatgaaattgcggaagaatatggcttgccttatcctaagactaagatcattacgatggatgactacaagtcaggtaagtacgaggatgtcccatttgatttcccagtggaattaaagccggaagatccagtttcatggttgaagtgtcaatttgaaggtcggaagaagacttttgccattcaagataaggctgaatttaaggatatcgtaactaagatttatactcatggctacaacgctgaccttattttgcaagactttattcctggtgatgattctaacatgcggaccttgaatgcttatgttgataagaaccaccaagtaaaaatgatgtgtttagggcacccattattggaagacccaaccccacaatcaattggtaattacatggcgattttgcctgagtacaatgaaaaattgtacgaagaagtacaacaattccttgaaaagttgaactacactggtatggccaactttgatatcaaatatgatccacgtgatggtgaattcaagttcttcgaaatcaacttacgtcagggacgttctagcttctacgtaactttgaacggttacaacttggctaaatggtacattgatgactatgttgaagatgccttgaaagataaggaaacagtttatggtaataagcttgaatctaaatacaagctttggttaggcgtgcctaagaagatattcaataattatgcttatgacaacgactataagacgactgctgacgaacttattcgtgagggccgctatggtactactgtcttttatgacaaggatagaaacttcaagcgctggttattgatgaagtacatgttccataactacttcaaacgttacaagacttactatgaagttaataagggtaagatctttgacgaagaaaataaaaaattaaacaaatagtttaaattgagaggtaaaaaatgcctctctttttttctaaaaaattttagctgaatcatttcccaatttaatggtcttttggttaatacaagatatattcatctatatttgaacacaatacaagatgttgtgttttatgctatgataaagacacgagatttggagtgattgaaatgctaaaagaagaatttaaccaacaaaatgtaacaaaatttaatacgcctaaaacttttgttaaacgtgatgggtcaaagtatccgttcgcaatttttaaactcaacatggttttgcataacctagatttagataatgtagcacctgctgtaattgaaaaaattgtggctaaactagatgctgctgatgaagtaaatgcacaagatgtagcagttgcttttagagatagcctaaatgagttgggttatttggatgaagctaaagcttatgtgcaataccgcaagcacgatgaagaggaatggattaaacaaaccgatactcgtgcacggttaaagcgaatggttaatggtgacccaacgattgttaacgagaatgccaacaaagatagtgaggtcttcagtactcaacgtgatttaactgccgggaccgttggtaaaacagttggtttgaccatgatgcctgagcacattgctaaagcccacttgcgcggtgatattcactggcatgacttggattacacaccactttcaccaatgactaactgctgtttgattgactttaaggatatgctaactaatggtttcaagattggaaatgcctatatgactagtcctaactcaatcaatgtggctacacatcaagttacgcaaattattactaatgtagcttctagtcaatatggtggctgttcttttgatcgagctgatgaagtgttagctccttttgcagagaaaaactaccaaaagcatttaaaggatgctggcaagttcattgatgatcctgaaaagctggaagaatatgctaagagtcaaactaagaaggacatttacgatgccatgcaaggcttggaatatgagattaataccatgttctctagccaagggcaaacgccatttactactttaggttttggtttaggtacttcttggattgaaaaagaaattcaaaaagatatcttgcgtatcagaattaaaggattgggtagagaacgcagaaccgcaattttccctaaattagttttcaccattaagaagggcttgaacttacatccaggggaccctaactacgatgttaaacaactggctattcaatgttcaactaagcggatgtatccagacgttttaatgtatgatacgatcaagaaaattacaggttctttcaaggttccaatgggctgtcgttcattcttacaaggctggaaggatgaaaatggtaaggaagttaactcgggcagaatgaacttgggtgttgtaactgttaacttgccaagaattgccatggagagtcatggcgataagaagttattctgggaaatcttcaatactagaatgcggacttgccaccaagctttagcctttaagggtagacgtgcaattcaagctaagcccgaaaatgcgccaattatgtatcaatatggcgtctttggtaaacgacttaagccaggtgatgatgttaacgagcttttcaaaaatggtcgagctacgatttcgttaggctacatcggtttgtacgaagtagggacagtcttttatggccctgattgggaacacaatgaagaagcacatgattttacaattgagatcgtgaagaaaatgcatgacttgtgtgctaagtgggaaaaagaggacccatatcattggcattacagtttgtactcaactcctagtgaaagtctaactgatcgcttctgccggctcgatacggcaaagtttggcaaggtgaaggacatcactgataaggaatactacactaattcgttccactatgatgttcgtaagcacccaaccccatttgaaaagttgacttttgaagcaccatatccatattatgctgcaggtggttttatccattattgtgagtaccctaacttgaagcaaaatccagcagcccttgaggcagtttgggattgggcttatgacaaggtaggctatctaggaactaatacgccaattgataaatgttataagtgcggttttgctggtgaattcaagtctactgccaagggttttgaatgtcctaagtgtggtaatcatgatcctgctacttgtgattgtgtcaagcgaacttgtggctacttgggcaacccattgaagcggccaatggttcacggtcgtcatgaagaaatcgtgcaccgggttaagcatatggactttggcatggaagatagtttagctaccgaagaagaagtaaaaaaaggtgagtactaatgcctgaaaaagataaaaacactcaagaaggaccagatatccggagtaatttgatcaaggttaatatgggtggggataccatgtttgtggatcctgaccaatataagccacagttagatcaccaacgtgagttaaaaagaatgcaccgcaagccgaaaaatccaaaaccacaagagtggaagactgaggattattctaaacataaaattgcggattataagccatttaactttgttgatggtgaaggcgttagatgtagtctttatgtttcaggctgtttgttcgattgccctggttgctataatttagcagcccaaaactttaattatggttttccatatacgcaagaattggaagaccgcattattaaagacttgggccagccatacgtgcagggattaaccttactaggcggagagccattcttgaatacttgggtttgtttaagaattattaaccgaattcgaaaagaatttggccacagtaaggacatctggtcctggtctggatatacttgggatgaattgcaaaaagaaacacctgataaaaaggaaatgttgtctaagatagatattctagttgatggccgctttatgaatgatttaaaggatttaaccctgcaattcagaggttctagtaaccaacgaattattgatgtgccaaagtcgatgaaggcaggcaaggttgtcatctgggataaattgcaaaaataagataaactaaagtccggaatgattttctggacttttttgctaggtgaaaaaatggaagaaaaaaatattaaacaagttgatcaaatcatgacggccttgacccaagtgattgatccagaattacaagttgatgtagtaaatcttggtctgatttatggcatcgatatcgaaggagataaggcaaccattaagatgactttaacaattatgggttgccctttatctgattatttggaacaacatattcaaaaagctgttctttcagttgctggaattaagtcttgtgacattaagctggtctggtatcccgtctggacgacagagcgtctttctagtgcagctaaaaagcaattaggtgtaactaaccatgatgatcaaattaagcaggagaaagccaccaaagagaagattatcgacttttcagtaccgatcaagaaaatggcagatgaataccctgactttgttcaaattatgtacgattgtggttttactagaattaaaattcctggattgcttaaaacggtggggcgtgtgatgaccattccattgggagctcaggcaatgaaacttgatttggctaaagtgaaaaaagcatttgaagataaaggatacaaggtaatcaatgactgataaaaaaagacaggacgcaatcctgaaaattttgcattatattcaaaacggcggcgattttgcgaccgcaaagaagatgtttcaagaagaattcgatcaggttgatgtggccgaaattacagcggcagagcgcgaattaatcaagcaggggttaaacccagcagagattcaatacctgtgtaatgtgcatgccgatgtctttaagggtaatatcaaggagaatgcggtaaatcctgattttgctactccggggcacccggtgcatacgattaagctggaaaatatggtactgaaatcattggttaatgacgcactcttgccagatttgaaaaagtatcaagcaggtcaagatacactggataaaatcagaaaagaattgagtgatttggcaacaatcgataagcattaccgacgtaaggagacctcgctttttccattaatgaataaatatggcattacagctccgcccgaagtgatgtggggcgttgatgatgatattcgcgatttaattggggatgcaagcaagattgctggtgaggagcatccagataaagatcagttggctgaggcaattaaaaaggcgagtcatgaagtgcttgagatgatctttaaagaggagagcattatgattccgatgattgacgaggtagctgatcaagatgattggtacaacgttaaacgcgaagagagtcagattggctataccctgattcgcaagccaatgaattggaagccaaaggaagctaaaaaagaagcagggcctatttctgttagcaatctttcatccttcctcattaattttgaagaaggaaggttaaatttagagcagttaaatgcaattttggatatgttgccatttgcattgacctttattgatgaacacgataaggtagcttattttggcggcggtgctgagatttatccgcactcgcgcaatgctattggcaatgacgtattctcgtgtcatactgctaaaagtagaccgttaattaaaaagatttttgcgcaatttcattcaggtgaagttgacaagtatgagtttcactttactccacacaagatgaagcgctgcttatacctacgctattatgcagtacgtgataaaaatggaaagtatctgggttgtcttgaggtagcacaagatgtgacagaaattagaagctggactgaagaaaagaaaaaaatttaacttgttgggctgtgttctagtaagggatgcagctttttcttttgccctcgtgcaaaaaatcacaattcttgctagactagattgagagaatgattaaaaagaagggaagagagaaaatgcgcacagcacatggaaaacaaccagctgatgaaatcaaattgcattggcttcttctaggccaattactaacgtggttgggttccagctttatttggccatttacttcagtttacctgcacgaccatcttggcgtttcactagctttagtgggtgtcgttttgctgttcaactgtgttgcaaatatgattgggtcatttatttcaggctggtgctatgaccatatggatccatatgtcttgctgattgtgggggctgctttagatgcggctgtcttgtttggcatggctttgaatcatagttggccgttatattggctctggatgactttaactggctttttgggtggctggaatggagcattgattaactcgattgctactagtattaaatctaagccaggtcgttatgtcttcaatatgatctactttgctcaaaatgttggggtcgtttgtgggacattagcagtaggttatctttatgattattcagtgactttattatttgtcattgctggtcttttattcgttggcgtttgcgttaacgcaattattaattatcggccaatgattcagttccacaaggagcgtttggctaacaaaggcgaatcaaagaagaaggcctttgagccgatgccaaaatacaatctgattatgtcaattggcttttttgttacgatcgctgtaatttggttgatgtacatgaactgggaatcaaacttgtctgtctacatggtttctttgggcattccttttcatctgtatagtttgttatggaccatcaatgccggaattattgtcatcgtgcaagctatcttaagtcgttttactatctttaagagcttatttagacaaattttatttggcactttgatgtttgcaatttcttttgttactttgatttttgccaaagattttgcacatttcgccttatccatggttatcttaactttaggcgaagcaaccgcaatgccgtcgattccaacttatgtcaatgatctgtcgcccgattctagtaagggcaagtatcaaggcttaaccttgtctgcatcgtcaattggtcgagctctaggtccattatttggtggtttaatcattgaagatttcggctatattcaattctttgctgttgctgcaattggtatctttttgcttttagtcatgcttattccaatgcatgcgaaactacagaaaaaactaaaattatttgtaaaataaaaacaacctgaattgtcaaattaagtgcaacagttaggttatgaagagatatattgcttgaagagttcctctgctgtgtgatattggaggattcggcgatatttgtggttaatggcatcagttgcctgttgaacataagcttttgacttgtctttcatgctcttgcccttagggaagaattgacgcaaaagaccattgcagttctcattggtgcccctttcccatggagaatatgggtgagcaaagtaaatctggcagcccttgatcttggtcatatccgcaaactcagagccattgtcaaacgtgattgatttaaaccaggcaggatgtctgtcaatctccttttgaagcagcctttggcatgtgcttgcccgatagtcaggaatcttgataactacttcaaagcgtgtggttctttcagtcaaagtcattaaagcaggctgattcttgcgtctgacgcctttaaccagatctccttcccagtgcagcggagcttttctgtcttcaacctccttaggacgctgttcaatggaattgccaagatgcttcttgtgcaaagcgtgaccgccatggctgtgatgacgcttgttcctgcgtcttttgagcttcataggcagatcaatattgcttatgtccagcaagccctgatcaatatagcgatagacggttggtgtgctgggacaagggtagcctggcatagtccttttgaattcaccaacgaactcatcgatgctggtggcatcaaatttagctttaaagcgtctggagagcattctcaaaaagacagcataatgcttcaatggattgcgctgatagcagtttttgcgacgcttctcataataaatctgtgcagtatcagcgtaatagtgctcatacaataaatagctgctgtctctttgcaggacgcttccgcgtttgatttcgcgactgattgtcgacttatggcagccaacttcttgagcgataacagtacgggaagttatgccggaatccagcattgcttgaatttgtccacgttgtacgctggttaattgatgatagtgcttagaaatgctagaatttgaattggtcatgaagatcttcctttcttgatttttcgtcacttcaagtttaggtcttcatggcctttttgtttaacacttagtgttgcacttcaattttaaatccgggaaaataaaaacaacatgatagcgttaatttttttataatgctatcatgtctttatatgaaaaatttttccactagggaggtaatttaatgtattttaacgtacgcggcggtgctggtgacattactaaggctaatacttcagcgcgtctacaagataatttatatttggccgttaactcagaatggttggaaaaggctaaaattccatctgatcgttcaagaaccagttcatttgatgggatcgatcttaatattgaaaagaacttgatgcaagactttgcagattttgctgctggtaagaaggaactgcctactgtgcctaacttcaagaaggcagttgagctttacaaggttgctaaaaactttgacaagcgaaatgcggatggtgccgcacctattcaggcagatttgcacgaaattttagacttgcgcaacttcgctgactttaacttgaaggcagcagatttttacaagaatggttttgccgttccatttgctttcagtgttgaagcagatatgaagaatactaagattcactcattgaattttggtggtccaagtactttcttgccagatacgactacttacaagactccagctgctgagaagttattggatgttttgaaaaagcaatctattaagttgttaacaatggccggacttgatgaaaaggacgcagaagattacgctgacttggcaattaagtatgacgctaagattgctaaggttgttaagtcaactgaagaatgggcagattacccagcaacttataatccagtttcattgactgactttgaagcaaaattcgattccttcaagatggattacttcttgggcggattatttaccaagaagccagaacggataatttcaactgaaccacgttacttagatcacgcggaagaattgttgaatgaagaaaactttgctgaaattaaggcttggatgctggttaagtttattaatggcgtagcttacagcttgtcacaagatttccgtgaagctgcctttccatttagtcaagctttgtcaggccaacctgagctttcaagtggcgttaagcaggcatatcatattactaatggtgacttcggcgaagtagtaggtgtctactatggtcaaacttactttggcgcagaagctaaagcagacgtgactgatatgattcacaagatgcttgatgtttatgaaaagagaattcgtgaaaattcatggctttctcaagcaactaaggataaggcaatcgttaagttgcgcgctttgatcttgaagatcggttatccagacaagattgaagaaatctatgaccgtttacaagttgatccaactgctagcctttatgaaaatgaagtgcaatttggtcgggaacaaattaagtacaatcttgagaaattgtaccaagatgttgaccgtacggtatggttgatgccaggtgatatggttaatgcatgttacgacccacaaagaaatgatttaactttcccagctgcaattttgcaaaaaccattctatgacttgaaacaaagtcgtgctactaattatggtggaatcggcgttgttattgcacacgaagtatcacatgcctttgacaataacggtgctcaattcgatgagtttggtaacatgaagaattggtggactgatgaagattttgctgaattcaagaagagaacgcaagctgaaatcgacttgtttgatggtattgaatatggccctgtaaccttgaacggtaagcaaatcgtatcagaaaacattgccgatcaaggtggtttgactgctgctgttgaagctaacaagggtgaaggtggcgacaagaaggcaatgcaagaattgtttgaaaactttgctcgtgtttggacaactaagcaattgccagaatcaattaagacgcaagtatctatcgacgttcacgcaccaggtccagaacgtgctaacgtgcaatcacaatgccaagaagaattctataaggcatttgatgtgaccgaaaacgatggcatgtggcttgctcctgaaaagagagtagtaatttggtaagtaacttttcttaatatcgagtatgaaaaattagctaaattacatataagctcctataacaagaatgactacagtgctgctactacactgcagccctttataacttattacccattaataaattttttgcactaaaaagtgtctgggaaaaaactaagtctcagatcatgaaaaaagaacgttgaatttttgtttcaacgctctttttgtatacttttagctccagccttgatattattaaatcatcacaaaataaaaaaggtggaaactaacatgtacaagaattatatcacaggtcaaactgctttaacacttaatctagattttgccattccggccaatcatttggctaatgtcatcagctggtttgtagattcaattccagaagatgttttagtaggcaagactgctaaaacgggccgcccagcctatcatccagccatgatgctcaaaatactgctttttgcttactccagaagagttttttctggcagaaagattgagttgatgctggaagaaaatctgccaatgatgatcttggctgaccagcaaaagatttcatatcatactatcaataattttagatcaagcagccatgccaatgaactgattaaaaagagctttatctacttcactaacctgttagaagatgaaggcttaatcaatgaaggtgctgcttttatcgatggtactaagattgaagctgatgctaaccgctatacatttgtctggcgcaaagcggttgaaaagtatcatgaaaagctgaaaggccaggcagttgaactttatgatgaattgattactaaagaagtagtcaaagaaatggaaaaagaaaaagttcaaactagtcaggggctaaaggaattagctcaagaaactgaagcagaaattaacaagctgactaaagagattgagcaggaaaacaaagccattcctggcggttcacctcgaaaagccaagcgacgtggactaaaaaagattctgcaccggctaagaaaagattatgtgccaagaatgcaaaaatatgaagaagccgaagagatctttgccggacgcaacagttattccaaaacagatcatgacgccacctttatgcatatgaaggaagaccacatgaaaaatggtcaattaaagcctggctacaatattcaagcagtcacgaccgatcaatatgtagttgattatgccatctttcctaatccgacagatttcaaaactttggagccggttttggatcaaatgaccgtgttggacaagtttgacaaaatcgtcgccgatgctggctatggcagtgaatacaattattcgatgctggaggaaaaatatccagacaagaagtactttattccctacactatgtatgaaaaagaacagaccagaaagtataagaatgatccaactaagctaatcaactggtactacaatgaaaaagatgattattacattgatcatcatggcgtcagattcaatttcaaatattacagccagcgtaaggatcgttctactggtcaggtccgtgattttaaggtttatgaggcagacgagttccagctaacgccagaattggaacaattggctaaaacagctagcggccgccagcgccaagttcgctataatcctaactggcaatatttaaaagaaaaagcaaaagaagttctccaaagcgaagaaggcagacacatctatggcatgagaaaatatgatgtagagccagttttcggacatttgaagaacgtatttggcatgcgcagaacgcacctgcgaggtaaagagaaggtcgaaaccgatatcggaattgcctttatgatgatgaatttgaacaaatattgtcaaagaaggtggctgaagggccgatttttattgttaaaaattttaaagagaacaaaaaaacgatcaagattcttaaaaaaggaaatcttgatcgtttttattcatctggaagctagttttttcccagacactttttagtttagtaattatttagttttagctgtcgagtaatcctttggcttaatccgcttaatgtaagatggatttggtcgacccaggattaatggtacacgctcgattacggtatcggcgtattctaagccgaaccaggaagctgggttagaagacaagttttgcaagcgaacccgcgcttccacaagccatttttcatagccaaccaattgtgtttgtggactgatgacgtcgttaacaataacgaatgagaagtcacctacgtcacgacctgggctggtggtgtattcctgtggttgtggctcaatcgtaccgtcggcgatcaagtcatgaacgatctgacgaatgtagacattcacactagtttgcttcttaaagccgaggtagagctgaatgttaattacgttcttcgtaccgtaagtgttaacagcatattcagcggtaaatggctcgttagtaacattgacagtgacaaaccagtaagcctttgctcgtttaggtcttttatccaaaattgagtacaggatttcacgtttgatgaacttattgtacttaacgttggccatgtaaaccaagttggtagcataagttgggtaattttcatcgtgacttaagttcgttaacatgtcggtatattcatctaagcgaacgtaagcattgcgagcttcacgcttgtcacgaaccttgttgccgtaataccaaacatacattatgaagccgatagcaccagcgatgaagagtgaaacgtaaccaccatgagtaaatttagtcaaacttgaaatcataaacatgatgtcaaggacaccgaagaagatcaagaagatccagttccaaacagtgttgactttcttcattactaaccattcataaagcaggatggtagtcattaacattgaaattgtaatggacagaccataagctgcttccatgtgagctgaagtttggaaatataagacgattgcgatagtagcaacacagatacccttgttaatggaaggaatataaatttgtcctttttcgttagatgggtagttgatgttcattcttggcaagaacttcaagcctgaagcttctgcaactaaagtgaatgaaccggtaattagggcctgagaagcaataacagcagcaatagtagccaaaatgatggcaaacaatctgatgttagctgggatcatttcaaagaatggattgagcacaccgccgtctgcaggacggtaagttgggttgttcaaaatccaaacgccttgaccaaagtagttgagtgacaagcaaacaaaaacaaatggccaagaaccaataatattgcttttaccaacgtgaccaacgtctgaatataaggcttcggcaccagtcgtagctaggaaaattgaccctaaaataaaaattccagccttattatatggactgactaataatctaatagcgtaaattggattgattgcttgcaagattgaccagtcaccgaccatgttcattacgcccattacacccaaaaaagtgaaccaaaggaacatgattgggccgaaggctttaccaatgatactagttcccattttttggatagaaaacagaactagcagaatgactacagtgatggcaataaccatgttttgagtagaaacgggtacattgccgccaaagttcagtcctttcagtccttcaatcgcagttgtaactgtaactgctggagttaaagtaccatcggccaaaatagcggctccaccaattagcgctggtagaactaaccatttagctcgttttctaaccaatgtgtataaggcaaaaatcccaccttctccgtggttagttgccttgagggcaataattacggtttgtaaggtagttagtagcgttacagtccaaagaaccaatgaaattgatccaatgataaagtcacgatttacattaccaatgccgccgttgccttcgacaattgatttcataacataaagcggactagtaccgatatcgccgtaaacaataccgatggcgattagtaagccggccgcgctcatgcgtttagctttattattcattatctcgttatctcccacaacaaaattgtagttttaataaaaaaagaaaatgccacgatgacattttcccttattgtacctattttcgtctatttcgctggacaatgcaagtgagatttgtcagaaattgaatccctgaattgtcaaattaagtgcaacagttaggttatgaagagatatattgcttgaagagttcctctgctgtgtgatattggaggattcggcgatatttgtggttaatggcatcagttgcctgttgaacataagcttttgacttgtctttcatgctcttgctcttagggaagaattgacgcaaaagaccattgcagttctcattggtgcccctttcccatggagaatatgggtgagcaaagtaaatctggcagcccttgatcttggtcatatccgcaaactcagagccattgtcaaacgtgattgatttaaaccaggcaggatgtctgtcaatctccttttgaagcagcctttggcatgtgcttgcccgatagtcaggaatcttgataactacttcaaagcgtgtggttctttcagtcaaagtcattaaagcaggctgattcttgcgtctgacgcctttaaccagatctccttcccagtgcagcggagcttttctgtcttcaatctctttaggacgctgttcaatggaattgccaagatgcttcttgtgcaaagcgtgaccgccatggctgtgatgacgcttgttcctgcgtcttttgagcttcataggcagatcaatattgcttatgtccagcaagccctgatcaatatagcgatagacggttggtgtgctgggacaagggtagcctggcatagtccttttgaattcaccaacgaactcatcgatgctggtggcatcaaatttagctttaaagcgtctggagagcattctcaaaaagacagcataatgcttcaatggattgcgctgatagcagtttttgcgacgcttctcataataaatctgtgcagtatcagcgtaatagtgctcatacaataaatagctgctgtctctttgcaggacgcttccgcgtttgatttcgcgactgattgtcgacttatggcagccgacttcttgagcgataacagtacgggaagttatgccggaatccagcattgcttgaatttgtccacgttgtacgctggttaattgatgatagtgcttagaaatgctagaatttgaattggtcatgaagatcttcctttcttgatttttcgtcacttcaagtttaggtcttcatggcctttttgtttaacacttagtgttgcacttcaattttaaatccgggcagaaattgaatctagaatttggtgatgataaagttaatgcattataataaaaaatatgcagtaaaaaagctcccatacagggagcctttttgatataaattatgaaagtgatgaaggaatcttagtacgttggtcttcgtcccatttttcccatgcttcataagtaagcatttcttctggcttaacaccagtcttttcttccatggccttaagcaagtccttaaagttgtagtcgtggtattgtaacacatgatcaaccaacttcttgcgtgggaagtggatgttgtttaaaacatagcgattgatatcaaccatgttatgattttcatcgtaaaggttgataacttcaagatcgtcttcatcgaattcagcgatgtagaagttagcgaagacctttaagtaatcaggttgttctttgaattcttcctgtggcatagtagtcttgttagcttctggcattacgactttaaagtcgtcgttttcttcattttctttatcagcttgagcttgagcgttcttttcttcttcagtcaaagttgttacccctttatttataaataaatagatacaaagtcaataataattttacagacttctacaaataaaagcaaatagaagtggttgagagatgcaaaagtatagaagtcagttttgattagtaaaatggagtaaaatgaagtaaaatataaatgtaaaaagtaaaatgaagtaaaatgaggaaaaatatgtataatgaaaatccttttgatgctgaatttggcgggatcccagagctatatcttgattttaatgatgatgcagttaaatttgctcaaagagcccatcgtctcaagaaacatccaacttattctctctttattacaggggtacgaggttcaggaaaaacagtttttatgaacaaagtgggtaaagaactaaaaaaatataaagatactatggtagtcactttgcacaattctgatgatctttttcgaatgatgtatatcaagctagtgcctatgctagataaaatcaaaaaatggacgccatcaatttctattaaagttccttttgtatcagtagatttcactgaagcaaatgaaaagcatgatgaaatatattataaagtagaaattaacaagattcttaaagctttgaacaaagtggggattcgtgttgcattttgtattgatgaagtgtcaaatacacccacaattcaaaaattggctgaggaattcaacgactggagcctaaataactatcaagtttcagtgattatgaccggactattaagtgaagtggcggaactatcaggcacacataatttaaccttcttggttcgggcggatagatttcacgtctctaaactatttgcgtcgtcaattgccagaacttacatggatgtattagacataacagctaagcaagcagaaattttggcagatatgtcaaaaggctatgcttatgcatttcaattgatcggagatttgatgtatgaaaatttaagtcaaaagatgacgtttgaaaaagctttggaatatactaaacttagattccgtgatgtacttttcaaccaagcgtatgatgtaattgctcatgaattaacggatgtggattttcaatttttgtacgctatggcgcaagataatagtattagttcaattattaggactatgcaaaaaagtaagcagtatgttaatagctatcgtgcaaaattaattaaatatgatctaattaagccaataattaggggaaaggtcggctttaccttacctttgtttagagatttcattcaagcaaagtatgatgagcttaactggggctagaatttattgaaaaaattcggcagaaaatcacagaaatgaacgcagatccagtttggagggatactattatggactatgagactaagctagctgaagagcgtgaatacggtgaagaaaaaggaattttaagtgcaattaagaaaattatttatcgtaaccggagctatggtgtatcagattccaaaactttggaggatctgacagaagactaccatgattctgtttcccgggatcaaattgaacaaatgatgaaagaagcctaggtctaatgaaaatagccgctgctcaatgtgagtaacggctatttttttacttgttatcatcagcagcagagctggaacttacggcagatgattgatcgttgcttgaggaagccgcgctggattggttgatggatgataatttaagtaattattcttttgaaaaaatatttcttacttgttggagtaaattatcgaattctgttgattcttttatgtggccgattatttttccatgacgggcaatgaaatcatacgatagcatttgaaataataatgcatctccatttgtgtgactagcataatctagcacatagaatctaaatggatcatctgtaatatggttatgagtaattgctagtcctattactaatccagactttttagtgtaagcatgtctgctcactactaaatagcgtctacgaatatttcctttttcagaatcatgtccacccatttcgtgaccagcatgtggttcagcatcgatcattattatgtcaccttgatggacatcaatccttctcatttgctagttcctttccgacaggtttgacttctctaggattgtatcctaattcttggtattctcgctttatttcagtatcataatcataatcgtcataagcggggtctgaccataaatcataattgtttttagcaattcttttgtatacaatatcaccgtttttatttacatcaacagagaattctgtattaagtggaactttgatagtacttggaatggtaagcactattgaatttccttgttttctagccttgactaccataataagccctccttatgctaaaaatattttattatttaagtatatactgtgaatacagtgagcacaaataaaaggagccacaaattggctcctttttcgttgtgtgtcgggcatggcatttgtctagtctagtgaaagtctagatcacgggtagttgtcgccaagtgtagcgaaccacaagccgttagcggtgacgctatgggtgaaggaagtggctagcgagttttccgagcctacgtacagaaacctggtcaggccaaatggtggatgagactgcagcacaagttaaagtccaaaggacaaccgtaaaaccaagacggtaaaccagggggcagtggaaaattaaagatgaatgtcttaccccgagagatctcgtggacaggtgaaaccgagtaagctttaatatcagcgatcgtaagcctggtcgaaaaaggttaatcgcgagaagtcagctgaggtcgtagtagtgctgaaggttttgtaatgaaactggagcgaagggcctaatgtttgtaagagcatatctcgctataagcaatgttcagacagtccggataagaggatagcctagcacaaagagaacgtaactctttgatggtgaaagcaattgggacaattctgaataaatttacaagtagaaatggagatatcacgagatggaactaattgaacagattttaagtcaaaataatctcaaggaagcaatcaggagagtcaaaatcaataagggagcgcctggtgtagacaggagaacagttgatgagcttgatagctattttaaaaagcatcaagtagaaataaaggacgccatcatgaagatgaagtatcgtccgcaagctgttcgcagagtctacattcctaaagctaatggtaagaaacgtcctttaggaatacccacggttgttgaccgagtaatccagcaggctattgcccaagtattaatgaagatctatgatcctcattttagtgagcatagctatggctttagacctggacgcagtgctcatgacgctattgaacaagtcttggaatatttaaacgaaggctatcaatgggttgttgacctggatattgagaaatactttgacacggtaaatcatgataaattaatttcaataattagagagcaagtaaatgacaaaaccaccctccatttaattcgagcctttcttaaagctggagtaatggaagatggttgggttaagcctaataaactaggtgtaccacaaggcggccctctttcaccaattctatccaatatctatttagataaaatggataaagaattggaacaaagaggcctgcgctttgtccgctatgccgatgactgcaatatctttttcaaaagcggtaaatcagccaaacgtgtgatgaattcaatttcatcatggctagaaagaaagctattcctaaaggtcaacgcaaccaaaaccaaagttgtacgaccaaccaagagcaactttcttggctttaccttctggaaaagtggcgaatactggcaagcaaagccaggagatgaccgcaaaatcaagctttatgacaagatgagagaacttctctgtcgcagaaaagcagctgctcagcctctatcactagtctttactaagataaatcaagtagttagaggctgggtcaattactttagagttggcgacatgaaatattttctaattaagttcagtcaatggctgcgtcataaagtacgggtggtaatcattaaacaatggaaactaccaaaacgaatatacattaacttaatgcggattaacaaggcactaaagtgcaattttagtgatgaagatattcataaagtagctaatacgcgcttaggttggtataaaagaagtacgggtcatgtcattaactttctgcttagcccaaaagtattgggcataagcaaagcggatcgcccaggcttggtcgatccgctagaatattatttatctcgtaaataatcacaaacgtagcgccggatacggaaccgtacgtccggtgcaatgagaggggcgagttataaaactccctctactctattgcttacttgttatcatcagcagcagagctggaacttacggcagatgattgatcgttgcttgaggaagccgcgctggattggctgctggatgattgttcctgctggtgatcgcttgaagaagatgaagaacttgattgatcatctgacttcttggactgctctttatccttatcagatgaggattttgcagaatcatcctgactagaattatctttgttagaatctgcatcagaattattagatttttgctggtcaggatcagcgttctttttattggaattattataggaagtattattgtgcgtttgagtgttggcatggctaatgtaagcaccggcgccacctccacctaagatgaacatcgcagcaataacaccccaaaagactaatttcttcatattaagacaactctcccttatcttagaaaaaatattaacgaatttgagccaattggtgactttgaatcgttagttatagtgtaagacatctggccggcaggttgattacaaaatactcaattttaactaattattaagaggtagaagaaaaatatgaattacgaattaactgaacaatcaatccaatatgtatttggcaacaagaagtataagaatgggcaaaagacccgcaatttgaagaacgtgaagactggcgctaaggcagatgagttgcaaaaggtgggtcaagcaattgctagtttgcaagaagactcacttgatgaagcatacttagtgcagaagtcacgtcttgtaccagcagctgaataaattaacgaacatatttaggaaataaggagaaaaaatgatggctaaaactactaagactatgaagttaactttcttgaacggagaaaagaagaaaattagtattacgttgggggatgcagtcgataatctaactgcggatcaagtacgcggtgcgatgaatacgattgcggaagccaatgcattcgagaaagacggtgttgcatattatcacactcctcaatcagctgcatacattgaacgcactattactgatatctttaatgattcagcagaatctgcagttgagcctgcagctaagcaagactaatctggacttgcttgaccaactaattagcttggtcaaaaggctcaggagaaaatatcgcaagatgtagagttcacacttagacctttaacagaaatcgtatagtaatattactttttcaattgattttgttacatcgttgtaaaatttaagaaaaagtaaagaaacagtaaagcgggcgcatgctcgctttttcttgttgtgtctaggattacggcattttgttattttagatttgtgtgaatggtattgggatagggaataggtgaattattacaaaagcaagattatagtcaatttaacttgctattttttcaagaggttagtacaatatgaatcgtggtaagtaataggacgtgcttcaggcgtgtcgcctgtacgcatgctgatccttcaacaatgactactacctcatgagagttataaactcatggatcttgctttgaagaattttgtacattataggctccctacatgctgaacctatggcctattacattttttatatttcaaggaggaaaagaccacatgaagaaaaatttaagaattgttagcgctgctgctgctgctttattagctgttgctcctgttgctcctgtcgctgcttcagctgtttctgttaacgctgctgcaaccactaccaacacagtatacactgtaattaatgctgatggtaccgcaatcaacactccagctgatgcaaaatacgatgttgatgtaacacctaaccttactgctattgcagcttctactgtaaatggacaaactattaacggtagcattactggtaacattactgctagttacaatggccaatcatacactggtactttagatactaagaatggtaaagtttctgttattgattcaaaggataaaccagttattcattttggggagcttgctaatggtttatatactgttattgtaaagggtgtatcattcaactttggtattgctaacgcacacaatactatcactcttggctcaaagaacagcaatgttgagttctcaactgatgagggtaagagctttgctaacactaaaaaggttgaacttaaccaagatggtactttaaagaatcctatttcaattaaagtttcaaacgttaatgcacttgacctttcaaatgctagcggtattaacttctacaacgcttcaaacggttcacaagtaactaagggttcagttaatgtaactgctggtgttaacggtcgtttgaacgtttcaactgttgctagtgaaatcttaaagaactttgctgcttaccaagtttcaaatggtaaggctgtatcacaaatgccagaccaaaaggctgtagttgctgatgttaatgctgctttaaaggctgctaatattccagttgacaatgctggttggtttgctgctccaacttcattctcagttaatgtaaaggtaacttcatcaattaatggtgttgacgctactttacctgtaaccgttaatgttgctaacggcaaggacactactgtaccaagccaaagcaagactattatgcacaacgcttacttctacgacaagaacgctaagcgtgttggtactgacaagcttacccgttacaagtcagtaactgttgctatgaacactactactatcaacggtaaggcttactacgaagtaatcgaaaacggtaaggctactggcaagttcatcaacgcagacaacattactggtactaagcgtactttgaagcacaacgcatacgtttacaagacttcaaagaagcgtgctaacaaggttaccttgaagaagggtactgaagtaattacttacggtggtacttacacattcaagaacggcaagcaatactacaagatcggtgacaacactgaaaagacttacgtaaaggcttcaaacttttaattaagtctatgtagtagataagataaaacgaggcaatttgcctcgtttttctttttgctctagaaaaaggtaccgcttgttgcgacaccctcggaaaatattattgttataacctagctctgcttcagaaattcttctaactgtttatcagagaacacattgccatacttttgctttaattgttgcaggatttgttggctagtgcagccaacatctttcaaagaagcgactaatgtaagtgcacctgttttaaggcctttcttttcaccaacttgctcgcgttcaagcattctagtttccaagtccataatagtatccctccattctggatcggcattcattgattcaatgcgtttttgtgccttatcaaaaagcttgtcaccatgtactggctaattttaaatccaactctataaaccatttgttataataaacgttgacgtttatgccttccaatatcagatctcgcattgggaggtgaacacatgctagatttgtttcactttttattaggctctatcttagcgccacttttagtgaacgtagtttcttatgtcttagagagactatttgacaagcggctaggcaatggtcatagcaaaaggcgtaaaaattatagattgggctctaaaagacatcacaagcgtcactagcctcagccaatacatttagttttaatgctataaaatttggtgaaacaaaaaatcgttactcatttgtccgattagagtagcgatttttttgtgtcttaactctcgcacatgcaagtcgttccacttttatatatacatgttagcatatttttctatatttttctatattcagggtttgtttgcagtatttacgtttaaattaatgttttggctctaaaaaagatgccgcttatgcgacatcttggaaaatattgttgttacaacttagctctgtttcagaaattcttctaactgtttatcagagaacacattgccatatttttgctttaattgttgcagaatttgttggctagtgcagcctacatctttcaaagaagcgactaatgtaagtgcacctgttttaaggccttgctgtaggcctttcttttcgccttcttttctgcctttcttctcgccttccatacgacctttcttttcaccaacttgctcgcgttcaagcattctagtttcaaaatccataatagtgtccctccattctggatcggcattcattgattcgatgcgtttttgtgccttatcaaagagtttatcgccatgtaccggtaaatctttcatgagtttgactaaattaagtaatgtttcagtctcggttccatcaggaactccgtttgaattaattataattttagtcaagccatcctgcaatatatctgcatgattgtctacattaatagtttggtatgtagacttgattgcaactttttgcttaattttgaacgtgcaaagaaaaataatgaagacatttttcaaattattgtaagtatagccctggtggagagtatacctttgatcgtttttcgaagcataatagcgcatgcgacgggcaatatcgtcatcgtctgaccgctgcatctcaatattgtaaaggttgccgttaatatcctcaaccaaaatatcgagtcggacatctttttgatcccgatgctcaggatcgatgattacttcttgcttcttaggcggaaagatcttcttaattaggatctccggcagaattccttgcaaaacatgcttgcagaaagctggattggacatgatttcgccaaaaaccttatcttctgaaaaaccaaaccataattctttttgtttgtgcgtatttttcattgcgcacctctttctaaaaaatagtaggataaaatgtaccctctattatttattacacaaaaaatcggcaaaattttttataaaattgtttttttcagcataataatttctagctatacaatcaatgcttcatactgtataatactattcaatatttgaaacaatatagatatattcaaacatagggagtgtgatggatgtgtcagcctacaagcaacgtaacttggggattattagcttgcccactgacataaaatatcgtaattggtccaaggaccttaccaagcggagaattgagaatgactcgcaattagagcaatacatcaagtatgacaataaatatcgactcaataagaacacattggcagtctatgagttcaagcaaaatcctatcttaggcaaatataaggcagtagccttcgacctgaatcgtggaattgtgcttagtcagaagtcaacacatgccatgatgcaaggattgatgcggcatgccgtacattgcgatatgatttggcagagaatgctagctcgcgaggctggagttgatatctatcaagggattgtcatgtacaatgtgctttatttttcaatgcatgcatttagtggaaacttcttcacggactggatttgcttgcactggattaaagacttccacgtcaaacgccatgatcaagctattttcaacagtattgcacttgatgaaaacggcttggtttataattttgcttttgattctcctaagcccaatcttacgaagataattggtcagtatctgtttcataatcattattattctgacttatattatcagcatatgttgcaagaaaataatcttcgcgtaacagccattaattctgattcaatcctgcataattctaactattatgtgcaactggacttgtacgctattgatagttttaaaaagctggcagacaaattctacaatcatgttttgaacttacacctacttacgattgtgaaagaatttaagccattagattatttgcaccgtgaacaccgcttttttactaagcagattattaagatcagatataatcgttaacagctctcatgagctgtatttttttgcacttttttgactatcatctgttcttcgtcaggtactatctgacttgactttgcttatcgtagaaattaacaaacacatgcgacacttgggattagagcatctcaccactaagtttttttgcagatccaatcttgctaatctaatagtgcacaagcgcttgtgacatcatttaggagagtgtcacaatgacaagtcaaaaatatttcgaagaagcatggaaaaatcgtaagttagttggtggtgccttaaaggcggcacatgttcgaccggactatcatctctatgaagatctgttgcaagaaggtgtaattttgtatgccgagatgttgcgcaaattagatgggcaaaaggttcgcagtgagattgataagcttagcttcaaaaaggttctttggcaaacaatcgatgctctgcgccgagagcaacgcgtatgtgaacgcaatactgcaattgacgaggcttatgacttaggtaaaacagaggcatgggataatcttgtagctttaaaggatgaagttaacaaactaagtcaacttgagcaagtaattctttttgagcatttgcttgagaaaaagacaattacgcagctagttaaagaatgcggtataccgcgtattacgttgaaacgattgaaaaagcagcttttaggtaaattacgtaatgtgatggaacaataagttcattttgtaacaaaatttaatttcacccggatttaaaattgaagtgcaacactaagtgttaaacaaaaaggccatgaagacctaaacttgaagtgacgaaaaatcaagaaaggaagatcttcatgaccaattcaaattctagcatttctaagcactatcatcaattaaccagcgtacaacgtggacaaattcaagcaatgctggattccggcataacttcccgtactgttatcgctcaagaagtcggctgccataagtcgacaatcagtcgcgaaatcaaacgcggaagcgtcctgcaaagagacagcagctatttattgtatgagcactattacgctgatactgcacagatttattatgagaagcgtcgcaaaaactgctatcagcgcaatccattgaagcattatgctgtctttttgagaatgctctccagacgctttaaagctaaatttgatgccaccagcatcgatgagttcgttggtgaattcaaaaggactatgccaggctacccttgtcccagcacaccaaccgtctatcgctatattgatcagggcttgctggacataagcaatattgatctgcctatgaagctcaaaagacgcaggaacaagcgtcatcacagccatggcggtcacgctttgcacaagaagcatcttggcaattccattgaacagcgtcctaaagagattgaagacagaaaagctccgctgcactgggaaggagatctggttaaaggcgtcagacgcaagaatcagcctgctttaatgactttgactgaaagaaccacacgctttgaagtagttatcaagattcctgactatcgggcaagcacatgccaaaggctgcttcaaaaggagattgacagacatcctgcctggtttaaatcaatcacgtttgacaatggctctgagtttgcggatatgaccaagatcaagggctgccagatttactttgctcacccatattctccatgggaaaggggcaccaatgagaactgcaatggtcttttgcgtcaattcttccctaagagcaagagcatgaaagacaagtcaaaagcttatgttcaacaggcaactgatgccattaaccacaaatatcgccgaatcctccaatatcacacagcagaggaactcttcaagcaatatatctcttcataacctaactgttgcacttaatttgacaattcaggaaatttaatttcataaaaaattttacctactttttgcgtaataagtagtagagggtaattttgctgaagcaataattgaaatgaggtaaaatatgattaaaataaaaagtcgatatccgagaagcactgacgatttggtctttggtcacgtcatgagcaataagaagaattgaatttcagactggtacgcacgttaaagttttcaattctaagggcaataatcatgacctgaaccaaaagataattgacttcttggattacatgaatggaatcatcaatcaccctgaaggttacatcgccagcttgcaaaaggatgtcgaccattacgtgaatagcggaaagtgggtcgaagatatggacaagttggaatatgaaatgaatgaagtcgctaggaaagtaaaaatagaagatgctaagaagctagtcctagtcattaaacgaatgggtggtactaaagacactgccttacaagaactcacaaacaattacggcgatatgcttagccatgatgaaattatcaaactagtacatgaagtttatcagtaaacagtaatcaataatctacagtaaaattatctttcaaaggtgtcgcaacagcgatgccttttttagagcaaaagaaaaagttcccccaattttatgttttataaaaaaaacagtatctatgctaattatggttctcaaattgaaaaatggataatttgatgttggaacaattgatggtattcaagttaaatactgcttgattggttgttagaagagtaaaaaagccatttcagtcacatttttgctgaaatggctttttctattttccatcttttaattatattatcttgaaatgacctcttcttatcctgaagtgtagtctaccaaaaatgtcagagattatttcgttccttctcgtagagtaaattattatcctaaattctattctcgttaatcatgctatcaggcaatataattttcattcgatcatcgaacatattgaagtttacctcagagccttgaatctgataatcataatgaatcaatgcattaactaaaacctctcgaataaccttaaatggtttaaatatttttatattgcacctgtatcataatgataaaaaagttaacgaatgcaactcgttagctctagtcgtagtctaagataactattagcttaatttttaagagcaaaagaaaaacgaggcaattgcctcgttttaaattattttctctttttagtatgtttgacagttttcttatgtgcctttttgtgattcttcttatgagctactttattatgtttcttcttggtaactttcttcttgcatagtatttccagtaatattacccaaactagtatgacttaatcgaccattcttgaccgcaaaatcaaattcaagattaccttgtgcaagagtactgtgtgcattaacactagcagaaccaataatttcaccattgttattaacaatagtaactgaacgatcagttgaagttggcgtcaaacccattattgttacttgtgcatttaaagtatatttaccattgtttaaaactgcatcgtttgtttcaatttcagtaccagtattattagtcaaatggatgttattaattgaggtagaagcactaattctagtgctgtttgtgtatacacttctatcacgaagatagtgagtgacaacactacttttagttacaactgcagctgcttgaatagtatttggggcagctaccaatgaaactacaggcgatgcagcgaacaaagccgccgctacaatactagtaaatacgcgtggtgctagttaaatcgttttagttaataaaaaagtccaattagactagactcaagttgtaagtaatttaaatagaaaagagtctgatctaattgaactatctcaagcttaatcgtttttctcaccatttacaagttagttttaatcggttaaatgtgatttgtcgctcgctgtataagctttatgcgcctgatggacttaaacatcgtaaaaatgttgatcagaccaagcttcctgatagttctatcttagcgatgctcatttggcaaactgaaattggaattgaatctcaacgaagattctgtaaattcttcgttggcttatctcattctcgttttaaccgtcgagctcgaatgctcttgcctctaattcgttgtatccgtcagggttggaatcaggaagtaaaggtaggtggagaattattgattatcgacagttttccgattccagtttgtcagcctgttcgcaattatcacgttaagatcttccgtggcatagccgatattggttataaagcgacgaaaaaaatctactattatggcttcaaagtccacgcaatagtgagtgatgatggctatctgcttgactacgcagttactaaggcgtcggtacatgatgcaaaagagacggtagaattgatgatcaatgctcatccaattaaccattatcttttaggagatgaaggctatttaggaaaagacttagcagccaagctaaagcgtatgggatacgtgctttggacaccatatcgtaaaaacatgaggggtgctaaaaagcataatgatcatcagttaatggcaattagaagaacaatcgaaagcgacttttctttgcttagctattacaatgctgagaataatcgagccaggagcttagtaggttttcaacaacggctagaaatagctattttagcttataatatggcatattgtctagaacgatttaactagcaccacgcgttagtaaatttaaaattctttttcattattatttcctccaaaaaaagacagagctttcgctctgcctttcttatttgtcagcgtataccacagacttaattaaaagtttgaagcctttacgtaagtcttttcagtgttgttaccgatcttgtagtatcgcttaccgttcttgaacttgtaagagccaccgtaggtaacaaccttgtcacccttcttaagaacaaccttattagcacgcttctttgaagtcttgtaaacgtatgcgttgtgcttcaaagtacgttcagtaccatcaatgttgtctgcgttgatgaacttgcctgaaagcttgccgtttccaactacttcgtagtaagccttgccgttgatggtagtggtcttaggtgaaacagttactgagttgtaacgagtcaacttcttgtcagtatcaacatgcttgccgtccttgttgtagtagaaggcgttgtgcataatagtcttgctttggctagcaacagtagtatctggcttagtagcagttaagtctgaactcttaacgaattcgtttgagccgtccttgttgatacgagtgtattcaacaccgttaacagttaccttaccgaatgtgtaaacagctgcgccctttgcaagagctggaatattagcagcttctgaaacaacattaccgttaatgttgtaaactttagtattatcagcctttacgtattcttgtggtgccttttcagtaggacccattacaattgcgtaaacagtaagctttgaagtaaagccagctggattagtagcagtaatagttactgggtacaaacctgcaacacttgggttaaccttgcttgagtcaatcttaatattgcttgagttgatcaattgttggtgagcagctaattctgctggagtcttgtcgaagccagtaccataggcactttgtacgtaagctttaacagcaccagttacagcatcgttgttaaatttaccatttacaataactttggtcttgtcagtgtccttaagtactaagttacctgaagttttaccatttgacataacgttgtcattgtagtaaacgttgccgtcaaatacaaatgcaggtgcattgtagtttactgatgcattaattcttacagtaattgtagttgaattaccattttctgacttagcagtcaacttaaggttgaaaccgtttgctggataatcaaagttaccgtttgaagcacgcttcaagccttgagctactaattgactttctacatctgaagcggtagtagtcatattaatagtgtcatttgattgatcactggtcttccaagcatagtgcttttgaatagcattcaaaagatctgatgaactaaagccgttagcaatttcgtttaatgaaacagtgctaccatcgtttacaacagtgttagtatccttgttgtagaagtaaggagtaccttgttggctagcgaacttagcatttaaagtaacttggtaagctctgtcattaacagtgaatgtaacaacttgttggaattcaccatttgagtttgaagcagatgctgacttaacagtaatattcttcatatcttctggcttagcatcctttaatgcatcgccacctaattgtaagatagcatccttttgagcatcgctcaatttgatactgaattgagtatttgaagcacggtcaagaacaatggtgcctcttaatgtaccaaggtcagtaacttcttgagaagtagcagctgaaacagtagaagcaggtgcaacagtgttggtagtggttgcagcagcgttaacagaaacagctgaagcagcgacaggagcaacaggagcaacagctaataaagcagcagcagcagcgctaacaattcttaaatttttcttcatgtggtcttttcctccttgaaatataaaaaatgtaataggccataggttcagcatgtagggagcctataatgtacaaaattcttcaaagcaagatccatgagtttataactctcatgaggtagtagtcattgttgaaggatcagcatgcgtacaggcgacacgcctgaagcacgtatattgtgtactcgatttttttcaagcaatgaaagggtggtttctgtcctcttatttgcttggggtcggttgggtggtttttgtccgctgcgcagatacttttatgaaaaaagagtacgatgcgatttgatgatttagagtgtcatttttggttttgttaagggatgcttgtaaaataataaggtaaagaaaatctaaagaagtaattttgtgaaaaagaaatcgacattttttgcgtacttatatattgtcaaaattaagatatgtaggtgataactatgttaaataaaaaggataaaactaaaattcaagaattaactgataaaacagtggacttgatcgtagaaaatatggggaaatcgcgtaaagaagcggaacaagattttcaaaagtcagatacatatgcgttcttatggctagcgaagcgtaatatcgaaaatgcgcaccctattattttgtacagaatgtttaattctgagttaaaagctaaaccaatagacgaagaacaacaaagttttattgactttatgactgataacacaatcgagttaattacacagaatactaatttgggaagataaaaggcaactaaagttttcaaatctacaaaggtatattggatactagttcactcaggacataatttagatgaatcttctcccgaagagctgtttgatatgtttagaaatgaacttagtataggtaatccactaccttcatctatgctgaagttaacttattaaaaaatttatataagttaaataatattattacaaatgttacttttttacgacaaatctgttgaaacgcttgtctagacctaatttgatagatacaatggaggtgttatattaaggaggataattttttatgaagaagagacttttgaccagttttgctgctgccgcaatgcttacttctgtagctgtgccagcagtaaatactacgatgatgaatcaagcctcaagccaacgagtttctgccgctaccgctgatcaaactgcatttttaaacaaggctgccaagcaggcagttaaagcagctaaaaaatatggaactttgccatcagtgatgattgcccaggcaataactgagtcaggctggggaaagtcaggattagccgtgaatgctaataacctttttgggatgaaggctgatgattcttggacaggtgagacttatactgccaagactagagaagaagataaaaacggtaagagctactatattactgctaagtttagaaaatacccatcttttgaacaatcatttgaagataatgggagtaagttgagaaatggtgtttcttgggatccgttgcgttataagggcacttggattgaaaatgcatcaacttatgcagctgcaaccaaggctttgaccggtacgtatgctacagactctaagtatgataaggcattaaatagtcatattactagttctaatttgactaagtatgatccagtaaccgttaatactactagaacttatactgctggcaaggatagttcaacttataattggccaactgctccatctgttgccagtgttattggctctgttaaagctggtgaaaaagtagtagttaccaagactattactttccatgatggttcaagcagaatgtatattgatggtcgcggttgggttaatggctcagttttggacaagagcagttccgcaactaaggaaccagtaactcaggcacctaagaatgtgccagctgtttctaagaacttgatgcataatgcctatgtttatgaccaaaatggtaagaagctaaagggcaagatgtacaagaccagtgatgaaaacggtggtaagtggatcaatacttatggtaccaagaccatcaagggtaagacctactaccgtgtcggtgaaaatgaatacattgcagctggtaatattgatggtagcctcagattcttgaagaagaatgcttatgtttacaatcaatatggcaatcgcgataacaatttgaagcacaagaagaatagccaaattgctacttacggcagtgctataactatcaatggtaagaaatactataaggtaggtattcgtcaatacgttaagaaatcgaacttcatgtaattaaggaaagggctttgttgtgaagatacgcaaatttttaattgccttaattgcgcttttggggttagtcggcgtatcatcggtcagtaaccaggtcaaagccgcttcgattaatactttagcgaagaaatatcaatatagtggtgtcacctatttatacaagatgctcaaactagaggggattaagtacaataaattccctggtgttgagtatcaaaatggcaagccagaaggaattgtcgttcatgagactgacgatcccggagctactgctcacgatgaagcaatctactttaaccgcgagtggaaaaatatcaacgcttacgtcaatgcttttgtagatagtaagcaagtcatccaaatgtattcacctaataatggtacttggggcgcaggaccgaatgccaacaatcgctttattcaaattgagctttgtgaagaagatagtcgtgatgcctttgctaagtcagttaataatgatgcaatttatattgccaagttgcttcatcgttacaatttaaagccagacaatgcttgcgatgatggtgaaggcacaatttggtcacacaaggcggttagcaccttcttaggtggaacagaccacgttgaccctgatagttattttgccaagtgggattacgacatggatcagttttattctttgatcgagtattactatgacttgcaaaagaagaatgaaaatactgatactaaggatccaaataagattaaggacgaagtaccagcagaagttcaaggtgcggtaactttaggtcacgatgcttatgtttatgacaagaacggcaagaagaccaagatcttgaagttagctggtagtccggtaaccgttttaggctacaagataatcagtaataagaagtactatcaaattggaaagaacgaatacgtagtagctactaatattgatgctactgctagaactgttaagaagaatacatatttgcggactcgttcaggtcgaattgaaaaaggtaatttggtcaagaagggtagtcgggtcatgacatatggcagcaagattacaattaaaggtcaaaagtattatgctttaaatgctacacaatatgttttagctagcgatattaattagaaaaatacgtcttaaaccataaataatgggaattaagacgtattttttgtataattcttgtgttgaatgtgaaaaggggagaatttaatggcgcaattatcattatttttggtcgtcttattagcgctcgtaattccaatatttatggcgcgtttcaaaataagcactgtaccaacggcgattgctgaaattatcgtcggaattattgtaggttcgagcggatttaatatcgtggtttcgatacatgatttaacatttttatcgaacctcggcgtaattttgctgatgtttttatcaggaatggaaattaattttgacctgctacagcgcaagaataatcctaaggctaaatcacaggcgggaaaaactgtcgatccgttgccaacagctttaacagctttcgctggaattgtggtaatggcctttgttttggcatatgttttaaagctgatagggctatttagcaatgttatcttggcagcgattatttttatgaccattgcattgggtgtagttattgctaccttgaaggaaaaggatattcttggccgaccgattggtcagacaattttgttaactgcggttttgggcgaagtaataccgttgctcttattaacgatttatgcctcagttaatggagggaatgctggccagctttggttgattatcttactgtttatcgctgcgattattcttttgcggcggtttaagcaaccgtatttatggtttagcaaagtaactaaggcaacgactcaattggatattcggttagccttcttcttgatttttgctttagttactgtagctgagcgagttggtgctgaaaatattttgggagcattcttggccgggatggtaatgaaattattggaaccaagcgaggcaactaaagataagctaacttcaatcggttatgggttctttatcccaatcttttttattatgactggcgtgggcttgaatttaaagtcactatttgctcatccatcatcattgatgttgttgccagttttggtcattttcttgttcttagctaaagctcctgtagtttttctttatatgcgctattttgaaaagaaaaatgcctttgctggtggctttttaactgctactacaattacgattgttttgccaactctacaagttgctagaaaattgcatgcaattacttcaacacaatcagatgcctttatcttagctgcggttattgtttgtatcgtgagtccgattgtctttaattcaaactttgttttatcacctgaggatcggatgaaagaaactgttactattgtgggtgccaatacttttacggtaccagttgcacatgatttgcatgataattggtatacgatcaagatgtttaccgatcagcaggaccaatacgaaacttatgatagtagggttaaaggtttaacattacttgataatttggataatcaaagcttagagcgtagtggtgcctttgattgcgacattttcgtagctgcagggcatcatgatcaagaaaatgcacgaatggcggaatatgccaaagacttgggagtcaaacgagcaattgcccgaatgaatgaagtcgatagcaatacgatggctcgatgccaggaggcaggagtagagttgttcaactttactaatgtacgttctgctctgatgcgagctttgattgagtctccaacggtctacaagattatgactgatactaacaatgtgttgtactcagttaaggtgagaagtacttcctatactggacgaccacttagggatctggaatttgtggacaagattacggttagtcgaattcggcgtggtgatgagtggttaataccacacggttggactgttattgagccgaatgatatcttgatcttttctggagaatttaaggttgctgatcgagtaaagaagttacttagtcatcaaaattagagataaaaagaggctaaatgcaaaaatcctgcatttaacctcttttttacgtaattaatgattttgtccttcaactgcttcaatgtcgccttgtccatcgcgctcaacaatagccccaattgcagcgattaagcctttaacaatatcggctaatgccattgatggagtgcttggtcttttgacaacttgttctggcaaaaatgggatgtgaatgaagccagctttaaggctagggaattctttagctcgcatgtattgcacttgataaaagatgtggttgcagacgtaagtaccggcagtgttggaaactgtagcaggtagaccaacagcgcgaatcgccttagccattgccttgattggtagttgggtgaagtaagccgtgtcgccatcggcttggataggttcaccgagcggttgataaccatcgttgtcggggatgcgaccatcgttaatattaatagctactcgttctggggttaaagcagcacgcccaccagcttgaccaacattaagtacataatctggtttttcttgcacgatggcatcatgaacaacttgggcagatttattgaaaaccgtaggaatttctaatttgataatttttgcacccttgattgagtcaggtagttttttgactgcttcaatggcggggttgatcttgtcgccaccaaaaggatcaaaaccagttactaaaattttcaatggcttttcctccaaatttaaatcatagaattttttgctttagtcaaaatttgcattgtctctaaagtattgacaaatgcttcatccgctttttgcgtatcgtgttgatcaatcatctgggcaaaagtattaaattcagctgccattcggtgcggatatttatttaaattataacgcttaggttgctcatttctcatttcaactgtgaaattatcaagtgttcccgttgagccgtcaaaatagatactacctttttcaccttcgataaaagaacgtggcgttacatagctatcttttgatgccgtgagggaggcttgtttgtcaggataagagaggtgaagaataccagaagtatcaacgcctttttgcatgttggcataatattgcacttgatcaggcaagccaaacaatgccgagacaagatgaatgttgtagatatttaaatccattaaagcaccgccatcttttttaggatcaaaaaccggcgcaattttgccttcaagaaaggcgtcatagcggctagaatattgcgtataatttaggttaacaatatgaattggtgcgatcttgttcaattctttttggatttgtttgaagttttctaaataaaggttagtaattgcttcaacgatgatcaaacccttttcgtcggctaacttttttaattcttttgcttgagtggtgctctgaacaaatggcttttcacagattacatttttatcgtgttctagagcagctttagcaatctcataatgcaagaagtttggcaccgctacataaactgtatcgacttcagaatcagccattaattcttcattgtccgtataagtacgtttgatgttgtactttttagctaattcccgggcaatattttcactgcgcttagttgaggaaatagccgttacagtcatattcgcaacttgatcagcggttgttaaaaagtcatggacgatcatgccgctgccaataattcctaatttcatttttttgcctacttctttttagtattagtggttggtaaatctttagcgttagttgcagagtctggtactcttaagaagtcatggctgccgaagttgccataactttgaccaactttaacgtacattaatttacctagtttcatattaacaaagacattaaaggtagataatttattacctttaattacagccttaacattcattgattggtacttgcctaattttttaatttggctgaaaattttagcttgatttgtactttgagcagtagtgtcaaaaattggtgctgctgcctttttcatcaaagcttggtcagtacttttagcagttaaagtataagtgtaaacaccatcttttttgctttttttcattttataagcagaaaccaacttatcacttggattggtgatcatgtggttattcatgatggcatcggttaagtcggcataattatgaccggttagtttttcaaggtcagccttgtaccaagtatcttgtccattaatgtagacattgttaaggttgacccattcctcagtagaactagttttacctttgctagtggtttgattggtgatgtggtaaacagtggttttaccaccaaaggtagtgttagctaaggcaacttgattagaagtgtcggtacccagagtaacagattgaataacctgtcccgacttgaagctacttttagctttttgtacaacttgagtcttagtcagagctgaagtagccttcttctcttgtttactgcagccacctaataaaaagaggacagcaaaggataaaccgataatcgttttcttaagtttcatttttttctcctctatgcttcaataagtctattataactaaaaagtccgttgctcgttggagttacggactattcttttactttattttgtattaattttgcctaaatctacggccgatttcttgatagaagcaggtaccgtcaactttttgacttgattaatttgatcaatctgcatggtgaaattctttttgtgtccttcatccttataagtagaagtcacattaacatttttgatgtcgtaattctgatctacgttaattttgatttcgttgctaattggtttaacatcatcaagatcgatgccgattaaagcagtaaaggcagaatcagatacaattgcgttccaaatttttttgttatttcctttataagtaagcagataatcattgccgttttgctttaccttaaaatattttgcgttagggatgaaaggcatgagtaatgtgccgttcaaattgtcggtaatggcaccataggcactagccttagacaactttgtcttaaaccaacgctgagaattggtacctttcatttggatatagttgcttttaccctcaatccacattttatagtgattagagctgctagaaacattagcataaataatcgttggctttttagtatattgggcttcggctttttgcaaagacttgccattgcttaattcattccaagtagcgtgcattgaactgaatttcgttttttctgcactggttaaaatcgtcttggcagtaggtaaattagctgtcttttttgaacctgtcttagagcaggccgttaaaaagagtaatgctaataaaacggtaatgataatattttgatgtttaaatttcatacataactttctttcattaaattttttcttctagtatagcaagaataacgttacaaaattgaaaaaacacgatttttttagtcttaactctatgaaaaaatttgtgaaatgtgtaaaatatggatgaaacattgaattttaaaaggagatatttcatgtcaaaattagttttaatccgtcacggtcaaagtgaatggaacctttcaaaccaatttactggttgggttgacgttaacctttcagaaaaaggtgttgaagaagctaagaaggctggccgtttaatcaaggaacacggtcttgaatttgaccaagcttacacttcattattaactcgtgctatcaagactttgcactttgcacttgaagaaagtggccaactttggattccagaaactaagacctggagacttaacgaacgtcactacggtgctttacaaggtttgaacaagaaggctactgctgaaaagtacggcgatgaacaagttcacatttggcgtcgttcatacgatgttttgccaccagctattgatgatgacaacgaattcagtcaagcacatgaccgtcgttacgcaaacttggacccacacatcgttcctaaggctgaaaacttacacgtatgtcttgatcgtgtaatgccattctgggaagaccacattgctccagatttacttgacggcaagaacgtaattatcgcagctcacggtaactcacttcgtgctttgactaagtacatcgaaaacatttctgatgaagacattatgaacttggaaatgaagaccggtgaaccagttgtttacacattcgacgaaaacttggatgttgttaacaaggaaaagttggacgactaatttattaagtagttattcacacaaatagaacttcggcgtaagtcggagtttttttatacaccaaaaaaggcatcaccgttaagggatgccttctttgtatcaacttgctccaaaaactataattatttctttgatttcataatttttttggaacaacttcattatattataaataaagaaagatcgccatttttttctaagaaagtggtgaaaattgacagttgtatatgataagtgctattttgagttacaggagtgtagaaattgggagaaaaatatgcaaacaatcgataattctctctttcaagtctctgtcgatgagaatggggcccggatggcacatctggtgtctttaacagatcaatttgattatctcggcgagcaagaaagtgaagaaggtatggcacttgcttttccagtaatggatcaagccgataatttggctaacaagttgccttggaccgttgttgacaaaggtgatactcgcgtaagtctaactttaattgatacgccggagagctataagagttttccatatcattttgaagtaatgactacttatgctttggagggtaatcaagtcaatatatccttttatttaaaaaattcttcaaataaggaactgccattttctttgggctttatcttaccaacttcttggcaaagtgaaagccaggtcaataagattagtttgactggcaaagaacatggcattgatcttacttcaactgattttaagttgagtgcaaaagaaggaagcgttacagcttttacggataaaattgaattagaggcaaaaagtagccgtaattttgcgttaagcttgactttgaagtaaaaattagtaacgattttaataagatatactaagcaagtcagcgatgatttgctttttttgttataatacattaaatgtgaatttacatcataataggtatattttatgaaagatagaaaacaaagatctaatcacccgcataatagtcgggtagacacacacagttataaaaatcgtcatatttgggtctgggttattagtatcgtagccttgcttgcggttgctggagcggcgtactttgcatcagtttatttccgtactaagtcagcggttgataagacctatgatcctaagactgcagtgaaaactacaggtgaatttgatggaaagaagaagttcgctgttttactgatggggactgatacaggtgcccttgatcgaactgaaaagcgcggccggactgataccatgattttagctgtagttaaccctgctaagaagcgttacacattggtctcaacaccgcgtgatacgatggcacagatggttggaagcgagagcttcaagacagaaaagattaacgccgcttatgaattaggcggggctaagatgtcaatggattcagtttctaagttaatcaatgtgccaatcaagtattatgccgtggttaacatgggtggaatcatgaagatgattcgctatgttggcggaattaatattagaccaacgcttagctttgaatatggcggttatatttttaaaaagggcaagctgacccatatgggtggtgcaggtgcgctagcatattctagaatgcgttatgatgatccgcgtggagattatggtcgtcaagaacgacaacggcaggtaattaccaccttgatcaagaaggcagtttcaattagttcattatcaaatctggattcaattttgacttctgtgtcaagcaatgttcggactaacttgccatttagtgcgatgcagcagattgcgatgaattatcgtagttgtgccaattcgtcatctagtgattatctacatggttacaatgcaatgatcgacgatgcggcttatcaagtacagccaactagtgaattgcaacggatttctaacctggtgcgcaaagaattagggttacctaaggaaacggtttcaaataatgaaactttccaaaacgaaaagaatattgcaaatggctttagctttaagagcgaaaaaacgcagcactatcatatctatgattacaccgaagaaggtgataattaatggcgcgcatttgggctactctgattggctacgtttttggaaatttcttaacggcgatgatcgttggcaaaatctttttaaaaataaatcctactgaatacggttcacataatccaggaacggctaacatgggtgctgtttttggtaaaaaatggggtattttaacctgtttaggcgatttgcttaaaagtttaattgccttgtttattgtatattttgcttttccagctcatattaatattgcttatacagggctaggcctgatcttaggacattgttttccaatctgggatcattttcgaggtggcaaaggagttgcggttgcagctcaggtagcagttttttataattggaaagctggctttgctactttattagtggctttggtattaacagcaattatgcaaaatttgacgattccgcctttagtgtttatgcttttattcagtataaatacattcttgcataatcaagaagcaggatttgtttttatcgtgattactttgatcatgtgctttaagttctggcatgatatcgtagactttttcaccggtcatggcaaaaaggttgatattctgctttcaattaaaaagaagctagggatcattaagtaatgacagaaatttttagtgaggacacagactagagaaaatgagtgagattaacaagaaaaaatcactaaatgctcttcaaatcatttgtttgattgtcgcagcattctttatgctagtgcagatgtattcttggggtagcacttttggtagattaccattaagtaccctaatgagatttattccaggactacttggtcacagtacgatggtactagtaccaatggtctttggtgctgtttatagcaaaagaaaggttcatccaactgaagcctttaagttttggattatagcggttgttacactagtgcttttatacttggtgaacttctttaaacgaccaggtacctttaatatgtggaagctctggggagtatttttcccagttttgactagtacatcagtattgttggctggcttgatttttagtatgctagttcaaccatacttgtatgaattacaacatcgcattactactaagcaaaatgtattattgcttagcgcattaactttgactggttttgcgactagtgcaggtacaatgatctttaacaagtcaatttatggcatttatttgatcttgtactttgcttgggggatgtttttagctaacgttaaaattcctaaaaaggtctttggctggtcaattgcagctggagtaatgtctttcttcgtaatgtttatcggtattcccggatttaatggggtttactggtaccaacgattatctggtcgaagtggcgtttattcctggaatcctaaatttttaagtaatattgcttcaccatttttgttcttaatggttttagcagccttcttaatctttagaaaagtgattgttagctatagtgctaagcagatgcacttctttattccagtaattatttttatggacgctccaattattggtggttttgttaaatcgttccgctttaccaatagcgctggatttaacaagttcttgatgattgtcatcatgatgctagctgcctggggcttaagctggctatatgagcgctatttattcaaggtgaagccggttaaacggacggttgcttttttcaagcaacataataacttagcagaaattgttgaagatgcttggactaacttcactgcttggatagttgaaaatcgagtacgactacttacatggggctggttctatgtattaagttttgcttcattcttaattgaatcagataatctgcggatccaaattacgactgcaactgatatcaatgccgtaattttcttgctcgggactagattcttcgctattattttgacagcaatcttccttgatgcaatgtttgcaattttctacttcattactacgcgttactggacttcaacagttttagtaactgtaattacaattggttgggctattgccaacaagattaaattagatcttcgtggggaaccaatttatccaactgaattagacgaaattgttaactggaagaccttgatgccaatggtcggccaacaaaagataattatgatcgctattgccttagtaattatcattgcattgactgtctttcttgcaattaagtttccaattaagaaaaagggctcatggaaacgccgtggtatttgggcattgttgagtttgcttttgttcatgacaccagtgcgctttaaccacgatggcggaattatttatcacattaaccgtggctttgataataagcaatcgtttagaaaccctgaacgtgatattcaaattaacggtccattattgaacttcttgaattactttgacctgcagattatgaataagccaactaactattcaaaatctacaattcaacatttgaatgagaagtacagcaagatcgctaatgaaattaacaaaacaagaaagaatactctaaagaatcaaactattgtttacaacttgagtgaaagttttgttgatccatatactttcccaactgtaaagatcgatcctaaggtgccaaatccagttaaatttattcaatcaatggctaagagatctacttacggtagcatgcttagtgcaggttatggtggtggtactgccaacatggaatgggaaactttgaccggtttcaacatgggaatgttcaagtcaaccttgacgccatatgttcaaattgtgccaaaccatgatttctatccaacggtcggaatggacttcaattataagtctgcagttcacccattcattggtacttactactcaagagtagaagactataagagatttaagtttaataagtttgtttaccttggctctaaatataagatcattgatcaaaagaaacttggtaaatcaacttataattctgattacactacttatgcaaatggtttgaaacaaatcaatagcatgaagggtggtcaattcattaatttgatttcaattcagaaccacatgccttacaacaattggtatccaaacaatgaatacatgggcaaggtatctggtgaactcttcaacactgctgctattcgtgaacaaatggcaacttacatgaagggtgttcaatacactgataaggctgtaaagcaatttatcggtaagattgataagatcaagaagccaatcacagttgtcttctatggggaccactacccaagtatcttgtcacaaaactacgctagtcgttatccagtgcaaatgcactcaactcgctacttcatttattctaacaagtatgctagagaacatggtgctaagagcaagttgactcacaactctaattacgtcaacactagtgactttactgcaatgatgcttgaacaaactaattctaaggtaactccttaccaagcattgttaacagaagttcacaagaagttgccagcaatcacgattaacttcaatggtgatcaaggcttccaattagttgaccaaaaggggcacttcgttgatccaaagaaattgacttcagaacaacaagcaattttgaaggattacgaaatggtgcaatatgatatgactgctggtcaagcttatggcttaaaagctaagggcttttacaagatcggtgactaaataaaagagatcgaacgtaaagttcggtcttttttctacgtaaagtcaagcgcaataaggtgtttggctttattttttacctaaattttgtcatgagtatcttttagtggcgatttatttttttagaaagcatactaaataagcccacctctatatttaatttatgggcttagcgttataatgtacttgatcaattaattacaactaaagtctttttggttatgtgtggctacgttgtaatcatatagttgatcattgataatcagagcataaatggttctgattagtttatgaattgaagcaatagctatctttttgaaccctttggtttgagaggatagctttttgctttcataataatctgctatatgacacggatttgtcttagctgcattatcaatttgtccaatagctcgataaagcaacttacgtgcgactgcattgccatgtttagtaatacttaaattagagtccatttctcctgactgatatctgcctggatcaattccgataaaagcattgattttattaggattactaaatctgcgtaaatctcctaactctgctaaaactctgacagcagtggtctgtgcaaagcctggaatgctttctaggttttctaaatcatgattaggcaaagacttcgctaacttaaccattcttgcgattaaattttctctttgatcacttaaattaagcaatctgtgtgcataatactgcacttgctcgacttctatgctagagcaagatacaactggataagcttgataagctaattcaattaatttatctgcagtccttagagcgtgtttaaaagcaatcccctttaagctcattaaccagttaataagctgttttttatcttctcttcttactaagtcacaatgaggatatcgcacaactatttgccagtaatttttacctttagcagaagaaaatagattttcaatttcaggaaaagtcgattgtagagcttggtgaagtcgatttttagccattactaagtcagctgttaactggtcatagaagcggctcaaagcattaagctgcttataagtttgagattgaagttgattaattggatgatgatatagtctttgaattaaggctaaatgataagcatcagttttatcagtcttattatgacgtagtcccatatccatttcttttttagctttaagaggattaagaattacataatcatagccatagtcttccagaaaagattgcagtgtacgtgaataaacaccggtagcttcaaaaataatttgcggatgtttagaaaaagcggttaattcatgaagcaattgaataaaaccaggacgattattagtaatggttagttcatttttgctttcaccaattagttcacaaacagtagaagtagacttgcttacatcaattccaaaagtaacttgcataataaaaacctccaaaacttagtagtaaaacgtatttacttaagaaatcagatctaattttctaaactcgacatctagtgtccacattcttcgaagagactattgaaaacttaagtaaaactgccagttttgtatacgacatcaagtgtctaaagacctcagggcatatcgttttactactactttaattctacaaaagaataaaaatagtgaatcaattatcccgtcggataactaattcactatttagcttagaatgttttgtatccaatgataaaataagggctaagaggaataactgataattagctgatttaaaggtgattagaatgaaaaagataataacaatggcactagccagtgctgcactatttggatcttctgcaacaactgttcaagctgggacatataatcctaagaacattaccagttttaatattaataggcgtaactatgtagctaagggaaagatttataaactccatttacccgcagctggtagattagttactaatggcaatgttactttaaaaaatagtatggaatggacctgtattccttatggtaaggacaaaaatacgtattatctgcgtaaaggcacatattatttaactagttcaaagaatattagtgtgaagactacttatactcgtttaactaagatccgtaagaatttagaaacttacgttgaaacaaagaagaataatgacaacagtagtcttaaagctagaaagattgaaattggtcaagatattaaagcaatgggtgaaatgtacgattacgatagtgtcgactactacacatttactattgactcacctcaaatggttacgatgaggatgatcaataatccgatttatcagcttggaaaaggtaacattttcagcaagatgaatgtaatcatgttcagtgaaaataatccagttggcggtagtacgatgctttacccagagagtttcgaaattaatggcaataagattgctagtcaaagctggtacttgtctaaaggaaattatacttttagtgtaaatactcgtggactttataattttcaattaacggctgttcctgatacgcgtgtggtaccggcagatactgagatagaatctttacaaaacactaaggatggtatggttgctaacttaagggatgcacgtcatgcgaagacttatgaacttgcatggcgtgaaaaaggctcaaaggcagctccattcacttctagtagcaatactacagaagtaagtactgcacctgctacacgttacatagacaaaaatgatcgtaaaatcccagtttcaattggtaaaaaattagttaatggtcaaagctactattttgtagctcgcggtgtaagcaatcctgattacattcgttacggcaatccggaaaaagataattattttggtgcttggagtaattcagtagaacacacttactatgcaccttcagatgcaacaccaggtgcagttgatttaaccactgctaaagctgacagtacttatcacaacattcatgtggcttggaataaaattgctagtgcacaaagttatcgcattgcctaccgccaaaaaggtacaaataagtggtactatgaagtaactgatcaggctactaacgcgattactggtattactagaaatagaaattatgaagtgaaattgcaagcattgaatggtgaaaaaactggtccatggtccgcaattaaaacaatttttgtaaaatagcggttgactaaaactatttttctcgttaatatcataactaacaaatgagtagcgagtcggctcagcgttcagagaactagcggttggtgtgagctagacaggccgattttagcgaagtacttaatagggttgctcctttaccggcttgaataaggcgcagcagcgcaaacgtgggtggtaccacggctaataatgtaatttagtcgtcccttggtcttttgaccaggggacgttttttattggaggaaaaactatggcaaaatttgatattttggaagatttaaaatggcgtggtgccattaatcaagaaactgatgaggaaggtttgagaaagtacttagcagaacatgacgattgggcattgtactgtggtactgacccaactggtgattcccttcatattggacaccttattccattcatgatcttgaagagattccaaatggcgggctaccatccagtaattttaattggtggtgttactggtgcgattggtgacccatcaggccgtaagactgaacgtactttacaaactgcggaacaagttaagcacaatgaagaaagcttaactaatcaaatgaagaagttatttggtactgaaaattttgaaattagaaacaatgctgaatggctaagcaagcttaacttgatcgacttcttgcgtgattatggcaagttattccaagttaacaatatgattaacaaggatgttgtagctagccgtcttgaaaatggtatttcatttactgaatttacttatcaaattttgcaagcaattgatttctaccacttgaataaagatgatggtgttcaacttcaaattggtggtagtgatcaatggggtaacattactgctggtattgatttaatccataagcttgaaggcgcagatcgtccagcctttggtttaactattccattgatgcttaaggctgatggtactaagtttggtaaatctgctggtggtgctgtttggcttgatccagaaaagactagtccttatgaattttaccaattctggattaatcaagatgaccgtgatgtggttaaatacttgaagtacttcactttccttagccgtgaagaaatcgaagatttagctgaaaagactgagaaagaaccttggaaacgtgctgcacaaaagaagctggctgaagaagttaccaagtttgttcatggcgaagcaggtcttgaagaagctaaaatgattactgatgccttgttctcgggcaatatcaagaacttatcagttgctcaaattgaacaaggcttgaagaatgctccaagtgcggaagctggcaatgaaaagaagaatattgttgatttcttagttgacactaagattgaaccttctaaacgtcaagctcgtgaagatgtaaagaatggtgccatttatgttaatggcgatcgtgagcaaagtactgatttcgaagttgatccatcaagtgactttgatggtaagtacgttattattcgtaaaggaaagagaaagtatactttagttacaattaaataattaaatatatgattttaacattttatatataaaaatagagggattttttcctctatttttttagctaataatcggagatatttactaccaactaatatttgtaaaagataaagataatgatttgtgtaaaataatattttacttcttaaattgttattttattttctaaaatcaattgctacaatctatttattaagttattcacaaattcacattattactatacaatttgttatttcaagtgtaataccaatataaaatagctgcgtataccttttgcaaatgctgatgcaaagcactctattaaaaactgactcttaataaaaatatgtgaaaagcagcactatctgctttacttctaatcaaacagtgttatagtaatagtgtaaagagaaagtaagtaaatagaaagaggttattaaaatgttagaatctaagaaagctattaagattatttcaagtttggtaatcggtttgagtttaggctgtgttcttactcctattgctcaagctacttcatttactgctcctaaattgggtactgcaacacaagctccaaccaatcctgctattaaaaagggtgataagatctttgttgttattaaagacaccaaaaatcaaaaagtagctgtttacaataaaaatgctgaaaaaactagcaaaaaagttgcaatgggttctacttataccgcaaaagacgttaagaaggttaataaaaagaagattgttagaatcaacaagagtcaatggttgaatactaaagacgtcgttaagaactaaataaaagcaaatttaataaccgttttgaatacttattttctaaaaatacttggagagaataaataaggacgaggatgttcaaatgaatgtcttcgccttttttggtataatgaagacgccgctttagctcaataggtagagcaccgccgtggtaaggaggaggtccccagttcaaacctgggaagcggcttagttgttgtttttggcaagaaaggaaaaattttatgaagcatgaacttacaatgaatgaaattgctaaatttcaaaaagaatatgagcaaaaaccacaaaatcgggttgcggaattggctgttgttaataatggtgtggctaaggctagtttggattcagaaaaggttaggaaattgaaccgcactttttcaattgaaatcccaactgataatgttactgatcaaaagcaatcgggtcgctgctggctatttgcggccttgaatacattgcgtcatggttttgctaagaagtataatgctaaaaactttactttttcacaaaattatttattcttctgggatcgaattgaacgagcaaatattttctttgataatattttgaataccgcagatcgtccacttagtgacagaacagtgcatacttatatgcagggacctgatactgatggtggccaatgggctatggctgtttctttgattaggaagtacggcttagtgccaacctatgctcaagatgaaagtttcactgccaacaatactgctttcttcaatcgtattttgaataataagttgcgagaagatggacttgtgttgcgtaagttagctcaagcaggtaaaaatgatgaaattgaagctaaacgtcaagaatttttgagtgaggtttaccgtatggcagtaattgctttcggtcaaccagtacaaaaatttgaccttgagtttaaggatgatgaaggtaagtatcattttgatggtgatcttactccacttgatttctttcacgactactttactgatgacttggatgactatattgttttgttcaatgcaccagatcatgaatttgataagctgtatgctttgccatttgaagacaatgtagagggcggaagtccagttcatttcttaaacactaaaattgaaaatcttaaagaagctgcgattaagcaacttgaagcaggcgaaactttttggtttggttgtgatgtaggtaaagatagcgatcgtcaaaagggaattttagctcataacctctatcaaactgatgctatttttaatattgaaactaagttaagcaaaaaagagagactggaaactggtgcttcgggttcaactcatgccatgacgatggttggtgtggatgttgttaatggaaagccacgtcaatggaaaattgaaaactcatggggaaacaaggtcggtgaaaaaggctactttgtgatggatgataactggtttgatgaatatctcttcaaagtagttgttaaaaaacaatatgtaccggaaaaactggttaagatttgggaaggcaaagcaacgccggtaaaagcatgggactcaatggcataatggaaattaaacaagttatcgattttactcaaacacacttaaagaatgaaaaaacgggtcatgatttttatcatggcgaacgtgtagctaatttggctagtcaaatgtatttagcagatcatgctgatgctcatgaagatagccgggtagttgctattattaaaacagcgggttatttgcatgacacgattgatgaaaaaatatgtgctgacccacaaaaggtaattgatgaaattaaagttttattgccgcaagtagggtttaatgaactggaggcatgggatattttattcaccattcaacacatgtcattttcagctaatattgagcatcactatcatttgcctttatctggacaatatgtgcaagatgctgatcgtctagaaagtttgggtgcgattggaattgcccgtgcctttacgtatggtggtaaacatggcaataagatttacgatccagagattaagccagccgttttaactagtcatgatcaatatcgtaaccatgtcgaaaccacaatcaaccacttttatgagaaactttttcatttagaagatttaatgaatactcctgctgccaaaaaagaagcggaaagacgaactgcatacatgcgcgactttgtacgtgaatttatgcaagaatggaatgtttagaataatttaattttgaataagccttgatacatcagcattgaggcttattttttaaataaattaaaaataatattaaaaaaaacttgcaaagcaaaaaatatttagctatacttataaacaacttaaatagttctattaattttctcataaacgaggggagcaataatatgaagtttaccaagttattcgctgcaggagcaaccgttttgattgctggctcaacattagcagcatgtggtagtaattctaattcgtcaagttcatcagctaagaaaacaattaattggatggattcggctgaaattccaacgatggacatttctaaggcaacagacgttaccagttttaaccaattgggtaacgttgaagaaggtttataccgtttaggtaagaattctaaagttgagaatgctttggcaacagataccaaggtgtcaaaagatggtaagacctggactttcaccttgcgtgattctaagtggtctaatggtgataagttaacggctaaagactttgtttactcatggcgcagaaccgttaatccaaagacggcttcacaatatgcttacctcttcgaaggaattcataatgccactcagatttctgcaggtaaggcaccagttaatagtttgggagtaaaggctgaaggtgataataagttagttgttaccttagacaaacgaattccatactttaaattattgatgggattcccattgttcttcccacaaaaccaaaaggtggttgaagctaatggctctaagtatggtacttcatctaagactacagccttcaacggaccttttgtacaaaagggctggactggttctaacctttcttggaagcttgtgaaaaacaagaattactgggacaagaagaatgttaagcttgatgctattaattacagcgtgcaaaagacaccatcaacagcttacaacttgtaccaatcaaataagcttgatgctactattttagattcacaacaaactaagaacttaaaacatcaaaagggttacactttgcgtgatactgcagcaaccttctatttgcaatttaaccaaaagaagaagattttccaaaatgctgacttgcgtagagcaatctcaatgtcaatcaatagaaaggcactgggaagtgctttaggtggtgctaataccccagcaaccagtttaacttcaaagggtgtagttaaccatgatggtaaggactggtcagaagttgttggtgataagaagaacgccgcatataacccaactgaagctaagaaactttacaagaaggctttgaaggaattaggcgttaagaacgtttcatttacaatcctgtctgatgatactgattcaggtcaaaagacgactgaaacacttcaaagtcaattagaagaaaacttgaagggtatgaaggtttcagtagctaacgtaccattcaagactcgtttgaaccgttcaactagtggtaacttcgatgttgttgtttcaggttggtcagctgactttgccgatccaatttcattcgttgacttgtttactagcaagaatgcacaaaataacggtaagtggagtaactcccaatacgacaagttgatcgctgattctaagactacagcagatacaactaagcgttgggatgaccttgaaaaagcagaaaagatcttgcttagcgatgaaggaatcgccccactttactacaagactgaagcttggttagttcgtccagacattaagggcattgtctacaatggcgctggcttaaactacaacttcaagaatacttatgtagcaaattaattaaaaaatcaggaggacatagtaatgattattatttcagcaattattattttacaaacaagacataaaaataatctctcttcacttgtaattgcgtaataatagtctagctatgatttgatgaatagatagaaggagcaaccatgtgaaggttgctcctttttgtaataaaaaagaatgagggtcaaaatgaaaaagtggaaaaagtattttagtgcaagtttattaaccgtcgtatcagctgcaactttggcagcctgttcaaataaaagttcgtcatctggtaccaagcaaaccttgaattggatgactaaatcagaattacaaactttagatttgtccaaggtgactgatgcaactagtttagatcaaattaataattcgatggaaggactctatcgtttaggtaaaaattccaaggtggaaaatgctttggcaactaagactgaggtatcaaaggatggtaaagtgtggcattttactttgagaaagaatgccaaatggtctaatggtgatccagttactgctaaagatttcgtctattcatggcgtaggactgttgatccaaagactgcctcacaatatgcttatcttttctcaggagtaaagaatgcggatgatgtagtagcaggaaagaagaaggttgaaacactcggtgttaaagcagatgataaccaacatttaaccgttactttggatagaagaattccatactttaagctattgatgggcttcggggttttcttccctcaaaatgaacatgccgttgaaaagtatggcaaaaattatggtacctcatctaaaacaatggtttataacggaccatttgtatcaaaaggctggaccggttcaaacttgtcttggaagctagttaaaaataaagattactgggacaaaggcaaggtaaaactaagtaagattaattacagcgtgcaaaagacaccatcaactgactataacttgtatcaatctggaaaattagatgtagcattattggcaccacaagctacaaaacaattgaagaaccagagtggttatacaattagaccagcttcttcaacacaatatttacaattaaacgaaaagaacaagcttttccaaaatactgacttccgccgtgcactttcattatcggttaatcgtaaggcattagcttcagctgtaggtggtgctaacaagccagtcactaccttttcaccaaatagtatgactgaagtaaatggcaaagattatactgaattagtcaaaactgctgaaactgataagttaatgacatataaccctactttagctaaaagttattggaagaaagcacaaaaggctttaggacagagcaaagttaacttcactttgctaacctatgacgatgatgatgccaaaaaagcaggtgaatacttgcaaagtactattgagtcaaacttgaaaggcgttaatgtcagagtaaatagtttacctaaaaagactgccttagttcgtggtcaaaatggtaactttgatgctttactgatgggttggcaagctgactttactgatccaatctcattccttgacttgaacacctcaaatgcttcatacaactggggcaagtgggctaataaggaatatgataagtatgtagcagcttctaaaactactggaaacgaaaatactcgttttgaagacttagctaaggctgaacgtgtattgttaactgagcaaggtgtagtaccactttaccagccagcagaagcttggatggttcgtccaactgtcaagggcgttgtatataatggtgctggagctaactataacttcaaatatgcttatgttgaaaagtagactaaaatcctaaatatctaaataatagaacttataacaataaacaactcctctatgtaattaaaaagcagaccgaaaaaatcggtctgctttttgattttcgcttgaaaaaagcaagttaggctagtaaagtaaaactaataattttttgaatgagaaaaggagagcttaaatgtcaaattgggatacaaaattcgctaaaaaaggtttaacgtttgatgatgttttattaattccagcagaaagtcatgttttgccaaacgaagttgatttgagtacgactttggcggataacattaaattaaatattccattgatcagtgcagggatggatactgtaactgaaggtgcaatggcaattgcaatggctctccaaggtgggctaggcgttgtgcacaagaatatgtcaattcaagcgcaagctggtgaagtagccaacgtaaagagcgtagttgtgccaactagtgctgcaaaggccgcaactgatgatcaaaaccatctgctctgtgctgcagcagttggtgtaaccagtgatacttttgaaagagcagaagcattgcttgaagctggtgctgatgcgatcgttatcgatactgctcatggtcactcagctggggtattgcgcaagatcaaagaaatccgcgatcattttccagaagcaactttgattgctggtaatgttgcgactggggatgcaactagagcactgtttgatgctgatgttgatgtcgtcaaagttggtattggccctggatcaatttgtactactagagttgttgctggtgttggtgtgccacaaatcacggctatttatgatgctgctacagctgcacgtgaatatcacaagccaatcattgcagatggtggaattaaatattcaggtgatgttgttaaagctttagcagcgggtggcaatgctgtcatgcttggctcaatgctatcaggtactactgaagcacctggcgaaatttttgaagataatggcaagaagtataagcgctatcgcggaatggggtctgttggtgcgatggcccaagcacacggttcaagtgaccgttacttccaaggtggcgtaaacgaagctaataaacttgttccagaaggtgttgaagctcgagtagaatataagggcgatgtttctgatgtagtctttcaaattgatggtggtctccgttcaggtatgggatattgtggtgctgcaaatattccggaattaattgataaagctcaatttgttcaaatcactaatgcaggtttacgtgaatcacatccacatgatgttcaaatgaccaaagctgctccaaactatacaaaatagatataataaaagttaaaaataagagagaaagcaaaatttctctcttatttttttaattttttggacattttaactagatatatttatttcttttggtataattaaaacaacattaaaaagtaaatgaaagcataaaataaaatgagggagcaattaatatggctagatacctattaaaacgtatattttatatgatcctcactttgcttatcgtggctacggtaacttttttcttaatgaaattgatgccgggttcaccttatgctaatgaagcaaagatgacgctaactcagcggcaaattatggatcaacagtatggtttaaataaacctatctggcaacaatatttgatttatattgcggggatgcttcacggtgattttgggacatccttccaatatagtaaccaaccggtagcttcattaattggggcgcgtttgggtgcgtcagtacaattaggtttacaagcattaattttgggagttgtccttggtgtaatcgctggggcaattgctgctatgagacagggtacttgggttgactcaactgctactgtaatttctattttgggtaaatcagttcctaactttgttttagcagttttgcttcaatactacatcggtttaaagctaggttggttcccaattgctggttgggggcaattttctcaaacgattatgccaacgattgctttggcagttggaccatttgcggaaacagctcggtttatccgaaccagtatggttgataccttaagtagtgactatattgagttaggtaaggccaagggcttaagtagaatggaagtcattagaaaacatgcaatgcgtaattcaatgattccattagtaactctgattggtccttatgctgtagccttgatgactggttcaatggttattgaaaatatctttaacgttcctgggattggtgaacaatttgttaagtcgattttgactaacgactatccaacaatcatgggaattacgatggtttactgtattggattagtagtaattctgttgattactgatattgtttatggattaattgatccaagaattagattagatgaaagcgaggcctagaagacaatatgactgaagaaaaattaaaccttcctgcagatgcctttgaacccttaccaaaagatgaagcacaggataacgaaaacattgcaggtccatctttatcgtttgcacaaaatgtttggcttcgcttcaagcagagaaaagcagctattatttctgcaattattgttattttgatgattgtagtagcttttggttcaaccccattcatcaataaatctactttagttaaatcgcacccacaatatgccaatttacctgctaaagtgccaggaatgagcgcaattaacgggttgaacggtaagattaagcaaaatggcaagtgggttgatgcttatgcccagaatggcgtgcctaaagataagtattttatcgcaggtacagattatttaggcagatctttgggacaaagaattatctatggtacaaagatttcattgatcgtcgctttagttgcagctttctttgatttaactatcggagtcgcgtacggaatagtgtccggctggaaaggcgggggagtcgataacgtaatgcagcgaattatcgaaattatctcttccgtgcctaatttaatcattgtagttttgatgttggtggtattaaaaccaggtattaagtcaattatcttggcaattgctatttcaagttggacgacaatggcacggcaagttagagcagaaactctgagtttgaaaaatgaagaatatgttttggcagctagatcattaggtgaatcaccttggaaaattgcttggaaacacttagtgccaaacctttcaagcatcatcattattcaaacgatgtatactattccaactgccatcttcttcgaagccttcttaagtttcatcggaatcggtatttcagccccagaaacttcactaggtgtacttttgaacgaaggacaaaagaattttcaattcttgccatatcagatgtggtatccagcaatcgtattgtgtgtgttgatgattgcctttaacttattaggtgatggtttgcgtgatgccttcgatccacggggacaaagatagaaaggattaacctaaatgccagaagaaagagttttagatgttaaaaatttaaaaattgatttccacacttatgctggtgaggttaaagctattcgtaacgtttcctttcacctaaataagggagagacgctcgcaattgtaggagaatcaggttcaggtaagtcggttactaccagaagtattatcggtctgttagcacgaaatgctcagattgaagacggtgagattgatttccacggcaaaaatttgctagagttatctgaaaaagaaatgcaaaaaattcgtggtaacgaaatttcgatgattttccaggatccaatgacttcgcttgacccaactatgaagattgggcagcaaattgcggagccattaatcaaacataagggtgcctctaagaaagaagcttgggctaaagccttggaaatgatgaaggccgtgggaatcccaaatgcagaagaacgaattaatcaatatcctcaccagttttcaggtgggatgagacaaagaatcgtaattgcgattgctttaatttgtgagccagagattttgctggctgatgaaccaactacagctctagacgtgactgtccaagctgaaatcttggacttgatgaaagacttgcaaaagcgggttaagacctcaattattttcattacgcacgacttgggcgtggtggccggtatggcagatagagtagctgtaatgtacgctggtgaattcttagaattcggtggtgttgatgaaattttttatgatccacagcatccatatacttggggcttaatcaattcaatgcctactttaaacagtgatactttggagtcgattccaggtacgcctcctaacttgcttgatccgcccaagggtgatccttttgcaccaagaaataagtatgccatgaagattgatgtggaaagaaagccaccatttttcaaggtaactgatactcactatgctgcaacctggcttttagcaccaggtgcacctaaagtggaaccaccagctgaaattacacgtcgctggaaaaaatataacttgatgaaacaagaagataaactgccagaggttaactagtcgcggtaaaggagatttttatgccagaaaaaaagaaaattttggaagtaaaacatctaaaacaatactttaaaaatggtcgtaatgtcaccaaggctgttgacgatgtaagctttaatatctatgaaggtgaaactttcggcttggtaggtgaatctggttctggtaagacaactactgggcgctcaattttgcaattgtataagccaactagtggcgaagtgatttttgaaggcaaaaatgtagcagatttaaaaagtcgtgcagacaaactagcttttacacgggatgcacaaatgatctttcaagatccttatgcttcacttaatcctagaatgactgttgaggacattattgctgaaggattagatattcaccatttggttaaaaataaagatgaacgaactgagagagtagaggaattattggaaactgttggcttaaatgcaagtcatgctagccgttttccacatgaattctcaggtggtcagcgtcaaagaatcgggattgctcgcgccttagccgtagagcccaaatttattgttgcagacgaacctatttcagctctagacgtatcaattcaagctcaagtagttaacttgatgattgaattacagaaaaagcgtggtttaacttacttgttcattgcccacgatttatcaatggttaagtttatttctgaccgaattggtgtaatgcactacggtaaactactggaagtaggtccagccgatgacgtctatgatcgaccacttcatgattacacgaagagtttgatttctgcagtgccaattcctgatccagaagttgagcggagccggacaaggattccttatgacgctcaaaaagaagaaatggacggaaagcaacgctcaatgcatgaaattcgtccaggacacttcgtacgctgctctgacgatgaagtcaagcattacgaagaagtagcggcaagctacgaaaattagataccaaatctaatgcaactctctctatattaatattatatttatgctaaaaaggcgatccgatatggatcgcctttttatatgatcattgctcgttaagctaatgaatcccatgctggtaggtcagtgattggaccttcagcgagcttcttttggttttcagttaagtacttcttgtggactacaacttcgtaaacatagtccttaaaccattcattattcatgacgtagaagcctttaacaccagatttatcgccccatgagttctcaactttccattgacgaacttcgccgttgtcttcatcaacaccaactaaagtcatggcatgtgacacttgaccgacgccggtctttaatctgtctgctttagacattttaaggtcaacgccgaataagtcatctaacttgtacaaattagtgtcaaggtaaccagttttacggtccatttgacgtaaaacatcgttaccaaaccaaacagcttcgccgtcttttaattgagcgatagcagcgctggacaagtattccattggtacattcaaaagcttgattctcagtgagccttcaatgttgtcttcagctggtagaccataaagcttgttatagtcatggtctggagcattggttaaaacaacatagtcatcaaaatcaacgtcgcccatgtacttgtgtaaaaactcaagtggagttaggttcttttctaaatgatatttcttgtcgtcatcacgatattcaagatcgaaagtcttaggtggttcacctactgcgatagcagtcatttggtaaacttcgcttaaaaatttttcgcgaacctttttaatttcatcatctttgccgtattgcttcaagtggcgcaatactaaagcatccttctttaacttatcgcccaaagcagtagcaaaaccagttgtatcattggtgttaaaagtttctggcattgcatatgaaggaacaacaccatatttttcaactaaagcggcagccatttggaattgtccaccatcactaccagcaaagtctaagtcagccttaacttgacgtgaatcaagtggcatgtcagcactgtctaagattctgttgtagaacatgttagcacgttcgatcttatcccagaagaagttgtaagcttgtgagaaggtgaagtccttagccttatatttcttaccaaaagcgtggcgcaaaacgttcaaagtcgcaaacagccagcaacgaccagaatgtttttggttagtgacattatttgtatcaagttcagttgaaaagacgcgggttaattgtccttgaacacgatcattataagatgcttcaagtacaccactgcgttgagctgcacgagcaacgactttattttcaggttttttattaaattcggcagagaacttttctagttcctgcacagttaattcatgagccataaaaaatctccttttcattttataatttttttctcaatttaattctattttaaagcaaaacaaaagcgggttcaatcagaactcgcttgagagaattattaatccgtcaacttattagatttcttgcctatatctaataaattaatcaatttggatagaattgccatcattgccagcagtttcctttggcaaagtgatggtcaatacaccattatcatactttgcatgaatctcacttgcaactacatttggtaatctatagcttctagaaatactgccctcacttctttccttatgaatgatatttctatttttatcgctagtgtccttaaatgattttcttgtgccgctgacatttaacgtaccgtcattatagttaacgttgatatcctgcttatccatgccaggcatgtcaatcttaactagatagtccttatcagtttctgcaacatcagattgcataatgttttcaatttcattatcgtcaaagaagtttcttggaaaaccaaaccaatcattcattgcatccatcatgtcgttgcgccgattcatcatattgtttgccataaataaaacttcctttcatttttgtatttgcttaattagaatataaggaaaagatcaactcatttcttgatctcttttctccttacactgtttattgtagtcgctttttatagaaatgacacaaattagcactcaaaaatttatagtgctaattttagactgataacgctgctacaataacattctgagattgtagataattattacgtatagaaaaataaagaaagtttgtgaaatagaaatggtatatttttagaaaatgacaccagaaggctatcaacaaattgaggatgaaattgctcgattaaaaaaagatcggccacgtagaattaaaattttgcaggctgcacgagctttaggtgatctttcggaaaatactgaatatactgaagcaaaacgtgatctaggtcacttacaaagtcgtctgcgttacctaggcaaacaattaaagtatctaagtgtataattttttacggtaagttgaataaataattaaaaaagcccaagtcctttgaatttggacttgagctcaaacaaaaagaccagtagtctgatgttaagaacaaaaaacacattagaagctggtcttttatgaattcaattgtaactgaaatcgcaaatattataaagtctgaagataattatattaagcgtgaaagaaaaataatctgtttcttcttaaacctgattaaggaaatcatggccttggctttagctaaagttgatgatgaaatgattaccaaggttaaagcacagggctatcagattgataagaagaatgagcgctcaatcaatatggcttttggcgaagttaggtatgtcagaagaagatatgtctgcccaggcaaacaagcaaggtatcccttggatgaattaatgggctttgacaaatacaagcgctacagtattttagcagtcaaaaacatcttagaagtaagcagcgttgccacttatcgcaatactgctctagcagtcaattgcctgtctggctttaatattagccatatgcaggtgggcaatttggtaaaaatggccgggaaaaatattaaagcgggccaagaagcagattcaagatatgatgccgcaggcactaagaaaaaggtcccagttttgtatcttgaaggcgatggcgtggtgatcaaaggcactaaaagccggttggaatttcatcgctatcaggtctgtgaaggcattgtcaatataagcaagaaacgcagaaagcgaatcaatgccaaggaatttgtttctttaagccgacttgatgcgctgaacgaagccaaggagtacctggccaatacttatgatctttctgatactgtaattcttagcaacgccgatggcggtgctggatatgccaaaacagacttcgatgacattgtagggctatgcaagcgtcatgagcatttcttggatgtctttcacctaaataagaaaatcaaagaaaggctatattttgcgcctgacctgcaaggcaagctgatttctgctttggaatacaaatacagctatgacaaagttaaaactatcctaaccactgcagaaagccgactaattgatgaattgaataccgagctcaatcatgattatctggggcgcctaaggaattatattgatcgtcattgggacgatattaagccgtttaagaaacgaaaactgactgtgactaaagccattggctgctgcgagagcaaccaccgcaagtatacctaccgtgttaaggggcaaggcaagaaatggtcaaaatctggagcagaaggcatgcttaggatcttaagctgcatcaagaatcgagagctggaattttggcttagcagcgagtttgaagattcagaaataactgtattgactgaacaggaattaaaagcagcggcccgtgacagcttaaagaagcgtcatgaagttcatttaggcatccagcatggcgcattaaccgcacaggtagctggcaatagttatttaagcaagctaagcagaaatttaagtcatataaatatttaagaaattaaggttagactaatggtttaaaggctaccgcaaaaacattgacacttactaaataagttgagaactataataaactgtctttttctggtataatatgggttttgtaggatacaattcagagtaggagtgaagaatttgaatacgccacaatcaagagagggtaatgtgatccgctatgccgtttatttagctggctatgtcgctgtgtttgcagtagtaaagctagttactagaaaatctccggttcatatttgggatttgattttattcggcttagttgcagccatgattctgttgttttatgtttatcgtttcaatcgagagcaacgcttttttgcccgtgattttaaacttccatggttgggcagtttgtcaactgttgttctattaacattagtgattacagttacacagatttcgatttcatacttacaatcatatggcaggattagtcattatgatttccaattgatatatgccaaaagtgaatcagttaacatgttttggtttttaatcgttgtccaaggaattgtattaccaatcctacaagaatttttggcgactggctttttgttcaattatgcttttcggcgaaatactaagcaagttgcaattatggggatcattgtttcaggtctgatttatagcttactgagctttcaaaattcagtagtactgtttattattgatgcaatttatggcatggtgtttgcttggagctatatgtacacacaaacattattgatgccaatttacttagctgtagttagtggcgtacttacagtgattatgatttaaaaacaaaaggatgagaaaaattctcatccttatttttgtataaaaaaagcggatagcgtgaatcgaacccgcatctacagcttgggaagctgtcgttctaccatttaactatacccgcaatatgtttttattttagcattttttctatttgaagatcaacacttttacgatcaattaagctggtaaaattttgaaaaagccagcggcgtagttcgttgggcataacaactagaggcattctattatggattggcgccatatctttgttaggcgcggtagtaaccattgaaaaataatcctgatcataaatacctgcaattaaggtaagtggttgattagtgcggaaggcgtagctatcatggtatttacgaccgttttcagcaatatgggtagttttagcatattcaaagaatttttcggttaagattaagcaacgttgcttggcaaaggatttgtcccacattgaaggcgctgaatcataaaatcgctcaattctagcgttaaataatggcttttttggatcaacgggacttggatagccccattttttgttgtttaattgcaattgaccattttgataaagcaaaacaggtgctacttggttaggaaaaatatcttgtgcttgaatgtcaaaatttggtgtaactaagggcaggtcaagatcgcttttgagatattgttgaatttgttttaaattaggtaaacgaaactggttgcacatacgcatttcctttctttagggctagtttaatcatagcctattttttgttaaaattaggtaattaaacaattaatattaataaaaaaataaacttaaaaattagaaaagagcaaaaagatggcgaaagaaattttattaactggtgaccgtcctactggtaagctgcacattggtcactatatcggttcattaaagaatagagtaaaattacaaaattcaggtaaatatgatccatatattatgattgcggatacacaggctttgaccgacaatgctcgtaatccggaaaaaattcgcaatagtttgatccaagtagctttagattacttagctgttggtattgatccagctaaatcaactatttatgttcaatcacaaattcctgctctatttgaattgactgcttactacatggatttagtaactgtggctcggcttgaaagaaatccaactgttaagacagaaattaagcaaaaagatttcaaagactctattccaattggctttttaaactatccagtttctcaagctgctgatatcaccgcttttaaagcaaccgttattcctgttggagatgaccaggaaccaatgttggaacaaacacgtgaaatcgttaggacttttaaccgtgtttataattgtgatgttttggttgaacctaaaggttatttcccacctaaaggtcaaggacgtttgccaggacttgatggtaatgcgaagatgtcgaagtcacttggcaatgcgatttatcttgctgatgatgcaaagacagttcaaaagaaagttatgtcaatgtacacggatcctaaccatattcacgttgaagaccctggtaaggttgaaggtaacactgtctttacatatcttgatgtcttcgatccagataaggacaaggtggcagaacttaaggcagaataccaaaagggtggcttaggtgacgttaagattaagcgttacttaaacaaggtccttgaagcagagcttgcaccaattcgtgaacgtcgcgaaaagtttgctcaagatgaagatgcggtttatgaaatgcttctggaaggttcaaaaaaggctaataaagtggctaatgcaacacttgaacaagtccgtgacgcaattggtttgaactatttcaagaatagataaggctgaggtaaagttatgcacgatcgaattccttggaaacaatattttatgatgcaggcgctagtaattgcgcaacgctctacttgtaatcgcgcattagttggtagcgtcttagtaaaaaataatcggattattggcactggttataatggttccgtttcaggacaaccgcattgtgacgatgtgggtcatcaaatggttgatggtcactgcgttagaactattcattcagaaatgaatgcgatcattcagtgtgctaagtttggtgtttctacagaaaatactgagatttatgtgacacattttccttgctataattgctgcagatccttgttgcaggcaggcgtgaaaaaaattaactattattttgactatcgcgataatccattggcgatgcaactacttcatgatagcggggtgccttatgaacagattaagattaatcgcaaatacgtggaaagcttggcccataaacttgaagaagacgagaattaatttaatttggttaatgggactagtaactgtatttttaataacgacaggatttgtccagccaaatattgaagatcatgctcatattttagataaagaaactcgcactttgattacggaaaaaaataatcgctattttcagactaaagaacaaccgcaaattgtcgttataacggttaaaaggctgaataagttaacacctaagatgctagatcattctaagcgaacggtctttattgtggtaggacagaaaggtaaaaagcgtaatgtgcaaatttattcaactaaagatttgcatagtgccttcaccgaggtcgctcggggcaatatcttgcgtgctgaagtagataaattgcgtagtcaaaataatgcaacttttaacaagggaattcgcttcgtctttcgggcatgtgcgactagagttgatcaacaatatcaatatgcacttgataaatatgatttgacgcaagcagaacaaaataaagtcgcgcgtccacatagtgtagctttaccaatcgcactggcactggcatttttaattacgggaattacttatttcttgcgtagatttagtcatcgtgatccaatttctaagaaatagtcggcttgacttatttgcattttgtccttacactttttatagacataattagcgaaaaactgttaggtgagactcctacgtgaacacacgctatcgcccagaaacatccagagatgccaacgggttaaataggtgtcgtcgacttaaggcgagatccagatagctagcatgtgcttacgtcacgtagtgttaaaactgaacgacgagtatgacagagccttgtttggcaaaagtcacctgcagagttacaggtggcttttttgttttgcttgtcccaattaaagaagggagcaaataatgttaaaagcagctagcaagaagcgatcgaatatagacattcaaaggattcaacggattgcgcgtgagtcacgtagcgagacgctggcgcgtttacaggcgagtgctgaagggctttcgactaataaggctgaagaaaacagaagagaatatggcaaaaacgaaatcattactaatagcaattcctctaaatggcgcttattatgggaatcaatcgctacgccatttacgttggttttattagtattaactttattaaccctgtttactagctatattttggtgccacaaggagataatgacttaattactacgatagtgatgatcgtgatgttgattatctcggttctcgtcaattttatccaaaaaatcagaattgctaaggtaactgatcaattactcaatatggtatcagttacaacgaatatccggcgtgatggcaaaaatgtggaattgccaacagatgaagtagtggttggtgatgtaattaacttgtcggctggtgatatgattccagcggatatgaagttgttaactagcaaagatcttttttgctcatcaagctatttagatggggatcctgagccggcagaaaagatggctaatgtagtaattaagccgagtatggctaatgattatttgaactaccctaatattctatatgagggaacaactattgtttcaggctctggcaccgggattgtttttgcaattggcaatcacactgtttttggcaaagcagttcaggctatttcccgtaaaaaagtaaaaactaccctgtttgaccgggaaatgaagcaattagctaaaatattgattatcgcgacagcaattgtgattccgcttttgtttgtgattaatggcctgactaaggggaattgggggggaaagcttaattttcgctttgacagcggcagttggcttaacaccagaagtgttgccgattattgttaattccaatttaacacggggcgcacgggaaatatcccaaaatggtgctgtcgttaagcaaatgaatgctattcaaaatttgggctcaactgatgtgttctgtatcgataaaaccgggactttgacacaaaatcaagtggttttagagcgtcactatgatttagatatgcaagaaaccccacagattttgaagttttcatatttgaatgcatattatcaaactggggtaaaagatttaatcgataaggcggtaattgatgccgcgggcgatgaactagatgtaaacgaaattcagcgtgattacaataaaattgacgaaattccctttgactacactcgaaaaagaatgagcgtggtagtggtagataacgatgaacaccacgggcagcacttattagtaactaaaggtgccgctgaagggatgctggcaatttctaataaggttgaacttaatggaaaggttgaggatttaactactgcctggcgagaaaagatcttaaatcagattaatgaattaaacgatgacggtttacgggtacttttagtaggttataaattaaatcctgccccagtaggtgagttctctgctaaagatgaacatgatttaaccattattggctatttggcttatcttgatccgccaaaagaaacaactaaagaagcgctggaagatcttaaaaaagattatgttgatgtcaagatttttactggtgataacgaagcagttactcgtgctattgctttgcaggtgggattaaacgttgatactgtttatgacggcacccagatcgaagcggttagcccggaagagttgcgtgaaattgttgaaaaatgcgatatatttgtgcgaataaccccggaattaagagtaaaaattattaatgcactcaaagcaaacggtcatacagtcggttatatggggaatggcaataaagacgctttagcaatgaaggtagctgatgtgaccgtaacttcgaatacgtcagttgatattatcaaagagtcagccgatattatttttgagcaaaaagatttgcagctgttagaagaaatgattctaatgggccgaaaagtcttttcaaatacaatgaaatatattaagaccttcttggtaactaacgctggtagtgtaattgcgatggttgtttcatcgctgctcttgccatttttgcctcttttgccattgcaagttttaattttaaatttgctgtttagcataagttgtctggttattccctttgatagtgtttctaaaaactatgtcaaaaagccacaaaaatggtcgattaagagatggccgaagtttgtacttaattttggtccgattctagcaattattgattttatcgcaatgggcttgatgttttatgtgatttgtccatatttagtagggtctaattatcatcattgggtctttatgacactattttattcggggatttttgtggaatcgctttggacaagaattatggtgattcacactttgcgtgatgaacgttttccattctttaagcaacatgccacgccagtggtgttcttggtgaccattggtatggcaattattggtacaatgttgccttcatcaagtatcgcgccaagtttgggcctagctcaattgccgtttggttattggggcatagtcttcttgctagaagtaatctacattttactgacgactttggttaagcacttatatttaaaaaaagaaaaattctgatttgaattaaaaggaattgctggttttagcccaattcctttttttgcatgttaaaataaaatagatattttagacgattaaaggagtttgattaatcaatggctgataaagatactttttatattacaaccccaatttactatccatctggtcgcttaacgatcggtaatgcttatactactattgcagctgatacaatggctcgttacaagcgcagtcaaggctacgatactttctttttaactggtactgatgaacacggcttaaagattgaacaaaaagctgaagcacaaggaattaagccacaagagttcgtcgacaagatggcggcttcttacaagaaattatggaagagtctcaatatttcttacgataagtttattagaacaactgacaaagagcacgtagctgccgtacaaaagatttttgaaaaattattagcaaaaggtgacatctacctaggcgaatatactggctggtactcagttgaagatgaagaatactttactgaatcacagcttgctgaagtttacaaagatgatgatggtaatgtaatcggcggtaaggctccaagtggtcatgaagtacgtttggttaaggaaccatcctacttcttcaagatgagcaagtatgctgaccgtttggtggaatactacaaggaacatcctgaatttattttgcctcattcacgtgaaaaggaaatgcttaataacttcattaagccaggtttggaagatttatcagttacccggactactgttaactggggaattcctgttctaagtgatcctaaacacgtggtttacgtttggatcgatgcactttcaaactatattaccgctttgggctatggttcagacgatgattcattgtttaagaaatattggcctgcagacgttcacttggtaggtaaggaaattgttcgtttccacactatttattggccaattatgttaatggctcttgatttgccacttcctaagcacattatcggccatggttgggtattgatgaaaaatggcaagatgtctaagtcaaagggaaatgccgtttatccagaatcattgactagtcgttatggtgttgatccacttcgctattacttgatgcgtgctcttccatttggcgatgacggtatttttacaccagaagactttgttgaaagaattaattatgacttggccaacgatttgggtaacttacttaacagaaccgtgtcaatgattaatcaatatcaagctggtcatgttgatgcagttcccgttgctcaagctgaatttggcaaagacttgcaagatacagctgctagtgtcattaatgattatcgcgaaaatatggattcacttcacttttcaaaggcattagacaatatttggaagttggtttctcgtgctaacaagtatattgatgaaactactccatgggctttgaacaaagaaggtaaaaaggaagaacttagcaaggtcatgagcaatttggctgaaagcttgcgtttaattgctattatgattgaaccagtaatgaccgaaactgcaccaattatgttcaagcaacttggtttaaattgggacaatgaagacgctaagcatttggcctttggtgactttgattgggatgttaaagtaattgaaaaaccacaaccaattttcccaagacttaagatggacgaagaagttaagtacatcaaggatgaaatggctaaagctaagccaaagaagaccactagaagtgaacaaaagaagggtgacgaaatcaccattgacgattttgacaaggttaagatccaagtaggccaaattttgtcagttgaaccagttaaaggctcaagcaagttgctcatgttcaagctggactttggtaatggcaaggaaacccaaattttgagtggtatccgcaagttttatccagatgcaagtgagctattagacaaaaaggttttagctgttactaacttaaagccacgtaagatgctgggtcaccttagtgaagggatgctcttatcaagtgaaaagcatggcaaaattaagttagctcttgttggtgatgaacatgcagttggggctgaactcggctaatggagatcattgataatcatactcatttgaatgacgagccgtttcgcggcaaggaacaatattatttagaacgagcaaaagcacttgatgtaaccaaggttatttgtgcggggcaagatcctgactttaatcaaagagcggttgacttagcacaaaggtttgataatgtctatgcgatggtcggttactgtcccgatgtggctaaagactatgatcaacaggctgaagataaactaattgaacaattgaagcagcctaaggtagttgcaatgggcgaaatcgggctagattattattgggatgaatcgccgcgcgacgtacagcgtaatgtttttgcgcggcaaattgaagtagcacatgacttgaagatgccagttgatatccatactagggatgcatttggagattgttataacatcttgaaaaatagcaatctggaatatggtgctgttttgcatagttttaacggtggtgttgactggttaaataagtttttggatttgaatgtttacttttcatattcaggtgttgtttctttcactaaggctacggaagtacacgagagtgcaaaagctgcgccacttgaccgaattttagttgaaaccgacgcgccatatttaacgcctaagccatatcgtggtcatcaaaatgaaactggctacgtacgttatgtggcagaagcaattgctaagttgaaggatattccactagagaaagtggcggatgctacttataagaacacagtgagagtttatgggcttaaataaaaagaattttgatgcggtaatcgttgttgaggggaaagacgataccatccgtttaaaacaatttttcccaggaatcgagacaattgagactaatggatcagccgtttcagatgaagtattgaagcaaatccaaaaattaagtgagagtcggcaaattattgtctttactgatcctgactttaatggcgaaagaatccggcgcattgtaactaaagctgttcctgatgcaaagcaagcttttattacccgtaaggaaggcgaacctcataaaaaggggagtctaggtgtagaacatgcttcaaaagaagcacttgagcatgcactaagtgatttgcatgaggttgaaccgcaaaaaagtgatttaactccagcaatttatcggcaattaggtttagctggtggtagcggctcacgaaaattacgtgaacaagtaggcattaaattacgagttggctatggcaattccaagcagttttataatcgcttgcatacttttggcgtttcattagctgaattaaaggcagctgtcaaggaggtagaaaatgacaaataatattccaattggctctccagttagaacacaagcaattgttaaccgttactttgtcaaagctaaaaagaacttagggcaaaatttcttagttgatcagactgctattttaggtattgttgaagctgctgggataaaaaaagatgatcaagtcattgaaattggaccaggtattggctctttgactgagcaactactgttggcaggtgctaaagtttttgcttatgaagttgatgatagcttacctacgattttacagaatgaactgcctaagaaaattgatgatcagcctttggctagtcgctttaagctgatcttgaaagatctattaaaagcggactttaaggtagatattagtgacttctttgattttactaagccaattaaagttgtagctaacttgccgtattacatcactacgccaatcatttttgccttagctgaatcagatttgcactttacttcattgaccttaatgatgcaaaaagaagtagcagaacgattagaagcccaaccaggcagcaaggaatacggtccgttgactatttccgttcagaccgaaatgaatgttaaacttgctttgcaggtgagtcataattcctttatgccgcgaccaaaagtagactcgagcgtagttgtcttaacgccactgaaggaaaagccagcaattgaaaatcgtaagcattttatttgggtagtgaaaatgtgtttttcacaaagaagaaagacactcaataataatttaaaagctttgttgcctgataaaactaagcgtgatgaattatttgcggaattaggggtaaatccaagaattcgccctgaagaattaacaattaaacaatttattaaaattgctagctttattcctgcaagatgatgtataatattgaatttattatatatttgtgataaaatgttgctaaaggagctgttgtttagtgccaacatcaattatcacaattaaacataagttggattctcacttaggtgatactttaacagtagtagctcaagcgggtcgtaagaaagttactaagagacggggaattctaagagagactttccctgcagtgtttgtggttgatttagaccaacatcaaaataattttaaacatgtttcttacagttataccgatttactaactaagaatattgcattagagtttgatgatgaagctgaagaggctgaagcttaaacacaatttttgaaattgtcactagcatttatttaaaatgttagtgcttttttttgccctttagagtatattaattaagtataaaccaaacattagaaaggagatttcatgaaacgttcagaaagattggtggacatgaccaaatatttaatggagcgtccccatactttaattgcactaccattctttgctaagcgttacggcgctgctaagtcatctatttcagaagatttagctattttgaagcacactcttgccagcaatcaagatggtattttggagactgtagccggtgcagctggtggcgtgcgctatattccatttttaggtaaaaaacacgcggaagcatatttgtcagatttatcaactaggattgaggatccaagtagaattttagccggtggttttgtgtatctgtcagatattttaggcaatacgcaagatttacgtaaaattggtgaattagtagctactcattatgcttatgaagaaatcgatgctgtcatgacagttgaaacaaaagggattgctttagccaaagcagttgctcgttttttagatgtaccatttgttacagctagaaagcgatcaaaggtaacagaaggtgctactatttctgttaactatatttcttcatcgttgtctcgagtatcgaagatggaattaccgactcgtgctcttaaaaaagaagctaaagttttaattgtcgatgattttatgaagggtggcggtaccctaaccggaatggaagaattagttaaggaattcgatggtactattgccggcgtttgtgtactctgtgaagccgattttgacaaagaaaagctgattaagaactatctttcattagtaaaaattagtgaaattgatactgcccaaaagctgattgtagcagaacctggtaacttcttaactgaaactgattttgaccgtttctaaaatggtatactagaatcaagttttgattattaagaggttaatattaatggaaaaatatgtagttgttcttgccgcaggtaagggcacacgaatgaagtcaaagttgtacaaggttttacacaaagtttgtggtaaaaccatggttgagcatgttgttgatgcagctcaaggcgttaatcctgcagaaatcgttacaatcgttggtacaggtgctggcgatgtagaaaaagtactggcagacaagtctaagtttgctttccaagaaaagcaattaggtactggtgacgccgtaatgactgcgcgtgaagaattgggtgacaaagatggtgctactttagtagttactggtgatacaccacttttcacaactgatacatttaatgaactattcaagtatcatgcagaaaaaggcaatgctgcaactgtattgaccgcggaagctccaaatccatttggctatggtcgaattattcgtgatgatcaaggcaatgttttacgaattgtagaacaaaaagatggtaaaccagaagaattaaaagtaaaagaaatcaatactggtgtattttgctttgacaataaaaaattatttgaagcattgaagcacgttaataatgacaatgctcaaggtgaatattacttaactgatgttttagaaatcttgcgcaatagtggtgaacgcgttggtgcttacaagatgcctgactttagtgaaagccttggcgttaatgaccgtattgcattagctcaagctactaagactatgcaaagaagaattaatgaacagcatatgcgtgatggtgtttcatttatcgaccctgatactgcttatattgatgcagatgttaagattggcaacgacactgtaattgaaggtaatgttgtgattaaaggaaacaccgaaattggtagtgattgctacattactagtggttcaagaatcgttgattctaagattggtaataatgtcactgttacttcttcaactgttgaagaagctgaaatggacgataatactgacatcggtcctaattcacaccttcgtcctaaggcaattattcgcaaaggtgcacatattggtaactttgtggaaattaagaaggctgagattggtgaaaatactaaagtaggtcacttgacttatgttggagacgctaccttaggtaaagacattaacattggctgtggtacgatcttctctaattacgatggtgtaaagaagttccatactaatgttggtgatcatgcctttattggtgctggctcaacattgattgctccaattaatgttgcagatcacgcctttattgcagctgataccactgttactaaggacgttaataaatatgacatggcaattggccgtggccgtcaagttaataagccagattattggcataagcttcctctttctcaagataaagaatgggattaagaataaggcactagtgtatcaagctagtgcttttttgttaagaattgctaaatacttattgcaaaataataattgagacctacaataaggtgtactaataataatttttacatgaggtaggtaatacaatgaaattaagtcataagttagttatggtttcagcagctgttttgatgggtgttagcccagtattaggcatggcagaaaatactgtatctgttcaagctgctactaagagtactaatggcgtacataatacttacggtaaaaacagcaaagtcaaagtaactaagactatgaagtttgtcgaccgtaatggtaagaaaacttctaagactgctcctaagggtggtagctacactatttggaacgtcaagaatatcgacggtcaagtttactacagtattcaaactgatttgaagtactggattcctgcaactgcaactgaaggtacagtaacttataagtcaggcaatactacttatactttaaagagtgatggcaagaaggtaacaacttctacttcaactaagaaggctgttaagaagactaattcaaataaaaacactaaaaaagtagttaaagaatcaactaaaaaaactgccactaagactactaaaaaaagcaactcagaaaagactactaagaaaacttcatcaaagaagacgccagtggctaaggcagttaagataactactaagaataaggcttacgtttacgacaagaatggtaagcgtgtaaaaaactatttaggcactagttacattggtaaaaagatcactgttaaaggtttaggtactaagaccattaatggtgttaaatattatgctttgcaaccaaatcattattacattaaagcttcagatgtaactgttaagtaataattgataggaaaaagacactttttcgtttctaaattggcaaaaaaatattttagatctacaatatataaatgaactttaagtttagtaagaatgaggtatttatcgatgaaattaagtcataaattagttatggtctcagcagctgcattgatgagtgttgctccacttttgggtactgcagaaaacgtcaacactgttcaagctgctcctaagaagactacttcaaagaaggcagcaaacaacaagatcactttggtacgtaatgcttatgtgtacgataagaatggtaagcgtcttgataagtacatgggcagtgcaaaaaacactactattgctaaaggcgtaactgttacttcaactggcactaagactatcaatggtgtaaagtactacgatcttggtggtggtgcttatatcaaggctgttaacgtagatggtaaagctgcgtcatcaacttcatcactgtcaaagggtactaaggctaagtttgtttctaactcatacatttatgacaagaacggtaaacgtatcagcaagtaccaaggcaaatctaagtttgttaagggtgattcagtcactacttacggtattcaaaccattaacggtaagaagtattaccaacttgacaagaagggtactgcttttgtacgaactgttaacattgatggtaaaaccacttcaaaccaagaatcatctgtttcaaatgatgcagaatcaactaaaaaatatgactactcattaaagaagaatgcttatatttatgataagaatggtaagcgcatcaacaagtaccaaggcaagtctaagcttttaaagggtgccgcaattgatgtttatggcattgaaaccattaagggtaaggattactaccaacttgacaagaaaggcactgcttttgttaaggcaagtaatgtaactagaaccgttaaggcaacttcaattaccatgaagaagaatgcttatatctacaatggtaacggtgacaccaagaagaagacagttaagaagggtaagactgttaaagctactgaagcaagatacattggtactaagctttactacaagattggtgataatcaattcgttaaggctgctaatgtaggtaaaatttcaggcccagaactagaaccagttaacgaaccagatggtgctgctactgttgatactggtgataatactgtagatccaaacgtaaccaaggtaactacgattaatgttgctccactttacaacattaagggacaaccagataacgttagagcatttggcgaaggtcaaagtcaacaagtttcagaattgagatatattgcaacttctgcaactgctaccccagaattattctataaattatcaagcggtagaggctatttaaagcagtcagacgttgctgtaagtggtaagattttaactcctgttaacactccagaacaagctagagcagacgttacagttgctacagcagctgataagactaagttgcttcaagacattaacgaagcaactagtgttaagaactcagaagcttacaagtttgcttcaagtgatgccaaggctgcatatgatagggcaattacaaatggtactgctgttaacaacgatgctacagctactattgctcaagttaacgaagcagatgctgcaattgttagcgctaaggctaaacttaacggtaagaaaatcactgtatcaagcattagtaatttgactccagcagaagtaacttcaattgtacaattggttgcaactgctaataatgtaccagaaagttcaattcaactttcaaatagtggtgctttgacaattgttactaatggttatactcaagttttaaaccttagtgattatgttactcaaacttcagcaacttcaactaactagaaatgcataaaataagacgtagtatctgaaaggacactacgtcttattttttaggatattttcgttgtactagaaagtacaaatatattctaacttttttagcgattaatagttagtgcttttttatggttgcggcaaaattcttgctataattaaggagaatgtggttctttttagagcaacttttgctaaaatagagctggttaaatatttttacggaggaaattatgtcctataaagacgatatgatgatcttcgcccttaactcaaatgtaccattagcacaaaagattgcggatcgtgtgggtgttccactttccaagtctagtgttgaacgtttcagtgatggcgaaattcaaattaatattgatgaaactgtgcgtggtaaagatgtctaccttgtacaatcaaccagtaagccagttaatgacaatttaatggaattgttgattatgattgacgctgtacgtcgtgcaagtgctcgtacaattaacattgttatgccttactacggttatgctcgtcaagatcgtaagactcgtgctcgtgaaccaattactgctaaattggttgcagacatgcttcaagctgcaggtgctgatcgcattctttcacttgacttacatgcaccacaaattcaaggtttctttgatattccagttgataacttaatgggtgctccacttttggcagactacttcttgcgtaacggcttagagaaagacgctgttgtagtttcaccagaccacggtggtgttactcgtgctagaaagcttgctgaattcttaggttgcccaattgccatcgttgataagcgtcgtcccaaggctaatgttgctgaagttatgaacattatcggtaacgttaagggtaagcgtgctatcatcattgatgacatgattgatactgctggtactattactttagctgctcaagccttaattgatgcaggtgctactgaagtttatgctagtgcaactcatgctgttctatctggtccagctattaagagattgaacgattcaccaatcaagaatttggttttgactgattcaatcaatcaaccagcagagaagaagcttgacaagatgcttttggtatcagttggtccattgatgggcgatgctattaagtgtatccaaaaccatgaagcacttagcccattgttcaacaccagatacgaagctgacaagaacaagtaagataaaatttgataataaaaaatggctagccgatgaggttagtcattttcctgaattgtcaaattaagtgcaacagttaggctatgaggaaatatattgcttgaagagttcttctgctgtgtgatattgaaggattcgacgatgtttgcggttaatggcatcagttgcctgttgaacataagcagctgacttatctttcatgcttttgcctttagggaagaattgacgcagaagtccattgcagttctcattggtgcctctttcccatggagaatatgggtgggcgaagtagatctggcagcctttgatcttggtcatatccgcaaactcagagccattgtcaaacgtgatcgatttaaaccaggcaggatgtctgtcaatctcattttgaagcagcctttggcatgtgcttgcccgatagtcaggaatcttgataactacttcaaagcgtgtggttctttcggtcaaagtcattaaagcaggctgattcttgcgtctgacgcctttaaccagatctccttcccagtgcagcggcgtttttctgtcttcaatctctttaggacgctgttcaatggaattgccaagatgcttcttgtgcaaagcatgaccgctatggccgtgatgacgcttgttcctgcgtcttttgagcttcataggcagatcaatattgcttatgtccagcaagccctgatcaatatagcgatagacagttggtgtgctgggacaagggtagcctggcatagtccttttgaattcaccaacgaattcatcgatgctggtggcatcaaatttagctttaaagcgtctggagagcattctcaaaaagacagcataatgcttcaatggattgcgctgatagcagtttttgcgacgcttctcataataaatctgtgcagtatcagcgtaatagtgctcatacaataaatagctgctgtctctttgcaggacacttccgcgtttgatttcgcgactgattgtcgacttatggcagccgacttcttgagcgataacagtacgggaagttatgccggaatccagcattgcttgaatttgtccacgttgtacgctggttaattgatgatagtgcttagaaatgctagaatttgaattggtcataaagatcttcctttcttgatttttcgtcacttcaagtttaggtcttcatggcctttttgtttaacacttagtgttgcacttcaattttaaatccgggggttagtcattttatttttttttgaaaaaatcatcaccatttataataaataagagtgtattaaaatacacatgagaaacatctataattagagatagatgtttttcatttaaagaggacaaaattatgacacaatatttatcattcgatattggcgggactaacttgaaatatgcattaattgatcaagaagggcatattcttgaaaaagaccgggtaaagactaatactgaaaacctagatgcattcatgcagacgatgtatgaagtcgctgacaagtatcaaggaaagttcgctggcattgcagtctgtgctcctggtaagattgatactaagaataaaattatctattttggtggagccttgccattcttagatggcttgaatttagaagagactttaggtaaaaaatatgatgtaccagttggcgtagaaaatgatggtaaagcagctgctttgtcagagcaatggctaggcgaattgcatgacgtcaatactggtatcgcaattaccttaggcactgctgttggcggcggtgtcatagttgataatcgtattttacatggctggacttttcaagctggcgaattgagttggatgattacgaattcaagtattggtactaggaatatggctgcttatgctggctttagttgttctgcggttaatatgatcaaaaaagttaacctggctttggggaatatcgatcttgataacggcttgaccgcgtttgaggcaattaacaatggcgatttaagagcactagccgtttttaaacgctattgccgcaatgtagcaatcatgatcctcaatattcaggcagtaatcaatggctctaaagtaattattggtggcgggattagtgcacagccaattttgattgaagaaattaacaatcaatttgataaaattttgcagaataatccaatgttgaataatcaagtgattaagccggtgattgtggctgctaagcatggcaatgattctaacttatatggtgcactttatgcattactgttggaattaaatgacgaagaagttaggtaaatattgcaacacaaaaaggggatgcgtcgcatcccttttttacatgagctaaataataatttaatctttgccagaaacaatcttggcaatcgcaatgctggcaccagcaacgcaagctaccatggcggttttacaaccaatcttgactacgtcttttaccaaatccttattttcatgaatgaagtcaaaagacattttagtatagtccatgcaataaccatgaactgtgtccatcaagtctttaacttgagtatagccgctcttaggttctgcctttacttcatcttctggattaatttgagttcttacatctgtatttaaatcatttctgttcatcataaatacctcgattctaggatttaccttaattttacttcttttgctcacgttttggtcttctcaaatatcttaaggcaccattcttaatatatttttgaaattgctcataaagtggatcgaaaatttgcggctgatcttcatcgtgactgagcatagttttagggaagaagaagcgttcatctccttggaaagtaccatttaatgcgcgaaccaatgggctgagttgggataactcaatcatgctgccgtcgtcttgcataatttcaatttgactattagcatttttccccgttggcttataagcatcatatggttcatcgaatgcggaattggtagcggtatagtaatcaggattaaagccagcttgcttgattaggctcttgagcttaggtaaaagatttttggtttcttcatcgattcggacactagctagcggttttctgtacaagtaacgcttggctaggtcagataagattggatcttgtgcctgggtccacatagaaaaattagtttccattactccatcatcaagctttaaataatcgtctaaagtccaattgccttcaaggaatttagtcaagctaggtgtaacttgcagatttccctttttataaacagtttgagcgcgctctaaaaggtgatgcaagatgacttccattgagcgtcctacgcggtggaagtagacctgttggtacatctgatagcgtgacacgatatagtcttcaacggcatgcatcccattgttggcaaaacaaataccattttgataaggacggattacccgtaaaattcttgataaatcgaacctaccatagttaactccggtgaaataagcatcccgctgcaaataatccatccggtcagcgtcagcttgacttgagatcattttaaccacttgcggattaggataagtcttagcgattacgctggcgactaattcaggaaagttaggtgcaacttgttttaatgcatggttaatttctgtattaggatcagtaatgatcttttgtccaattttttcatgattggtgccaaaaaggtgctcgaatgtgtgcgaatagggcccgtgaccgatgtcatgaagcaatccggcacattctaccagtaatcgattatcatcgttccagagaccgtctcctggcgtaattgagggatattttttgctaaagatatcgcaaattcttctcgttaattcataaacgcctaagttgtgctcaaatctagtgtgagttgcacctggaaaaacatagctaacaggacctaactgtttaatgcgacgcatgcgttgaaattctttagacttcagtatgtccaaaacaactttatcttcaatatgaatatagccgtgaaccggatcacggagaacaacctcttgttttaatttttcgctttgaaatcttgtcataaaaatccaccaagtttaatttattaattttttgaactatatataataaaatagattatatctaactaaaattatatcagagatatagtaataatgtttaaagggggcgcttgtttgacagcaattacgattgatttgactagtaaaattactcaagacgatgagacagagacttttacgcgacatgcgcaagggcaattgactgaagaaggcgacgtcacacgaatttcttatgccgaagaagggcaaattccagtgaagatgcttctaaaggagaatgaattgttgattcgccgcggcgttgacagcaataattattctttaatgaaatttattccgggtgaaaaaggcaactgccgctatgtagttgaagggcgccgcatggacatgaccagcgtgactaacttgcttgaatatcagagtcaagatgatggttcacgtaaacttcgggttgaatatgacctctttaatggactatacttaataggtaactatgcagtcacgttgatttttacttaaaggcctagtagaatagtaaagattgtataagagaggacgtacagctgtgggattagacaaatttaaagacaaaaatcgcgatgaattgtcaatgatcgaagttgctcgtgcaattttggaagacaatggcaagagaatggcatttgccgatattgttaatgccgtacaaaaatacttgaataagagtgacgaagaaattcgtgaacgtttaccacaattttatactaatatgaacactgatggtgaatttatctcaatgggtgaaaatgtttgggcacttcgttcatggttcccatatgaatcagttgatgaagaagttaatcaccctgaggatgaagaagacgattcacgtaagcaccacaagaaggttaatgccttcttagctagcgctactggtgatgatgacattatcgactacgataacgatgatccagaagatgacgacttagacgccacagacgatgatactgatgatgtattgccagatggcattgaaggtcaattgtcacaattaaatgatgatgatgatgatgacgaagaagataattaatttgcttgacttaagaagaaaaagcagataatatttttgttgggcaccctatgtgcgtttagctccccgttagtgggagcttttttgtttaaaggataagttaaaaggagcagaacatgacaaaatacatcttcgtaactggcggtgtcgtatcttcacttggtaaagggattactgcatcaagtttaggtcgacttcttaagaatcgtggcttgaaggtcactatgcaaaagtttgacccatatattaatattgacccaggtacaatgaatccataccaacacggtgaagtttatgttaccgacgatggtacagaagctgaccttgacttaggtcactatgaaagaatcgtagatgttagaactagcaagtattctaacgtaactactggtaagatttaccaagaagttttggaaaaagaacgtcgtggtgactaccatggtgctactgtacaagtaattcctcatattactgacatgatcaaaaagaagatcatgcgtgcagctttgactactgattcagatgtaattatttctgaaattggtggtactgttggtgatatcgaatcaactccattcatggaagctattcgtcaaatgcgccgtgaagttggtccagaaaatgtaatgtacattcactgtactttggttccacttcttcacgctgctcatgaaatgaagactaagccaacacaacactcagttgcggaattgcgtagtattggtattcaaccaaatatgctggtacttcgtgctgaacaaccaattgaccaagaacacaaagacaagatttctacttttacagacgtgcctgttgatcgaattattgaatcaattgatgctccttcattattcgatgtgcctttgaacttccaaaagcaaggcatggatcaaaaagtctgtgatttcttacacttagagagtccaaagccagaagctgacatggaagcttggaagaagcttgatgaacgtgctaagaccttgaagcatcacactaagattaccttggttggtaagtatgtagagcttgaagacgcttatatttcagttactgatgctttgcaacatgctggttatctttacaacactaagattgatgttgataaggtacaagctgaagacgtaactgaagataatattgcagaaatcatgaaggattcagatggtttgattgtccctggtggttttggtactcgtggtcttgaaggaatgattactgcaattaagtatgctcgtgaacatgacatcccattcttaggtatttgtttggggatgcagatggctagtgttgaatttgcacgcgatgtattaaaccttgaggatgctaattctgcagaagcagagccaaactgcaagaataatattatcgacattatggctgataagcgtgatgaagaaaatattggtggtactttgcggttaggtatttacccagctactcttaagaagggaactaagactcgtgcggcttacgatgatcaagatgttattcaagaacgtcaccgtcaccgttttgaattcaataatgaataccgtgaagcctttgaaaaggctggtatggtcttctcaggcgtttcaccagataaccgcttagttgaaattatcgaattaccaaagaaaaaattctttattgcagcacaatatcacccagaatttttgagtcgtccacaacgtccagaaggcttatttaagtcatttattggcgctgctagtggtcttccagcacaagaattttaaagtgattaaagtttgattatacaaaatcttaagaaaacaagaactgagagacctcagctcttgttttttttgtaaatatcctttaacattattatgattaattgaaagtagaaaaggatttgttttcgccaatgaagcagatgataattcatggtggaaagcccctgcagggtgatgtttggatcggtggagctaagaactcaacagttgctcttattccggcatcaattttatcaagaacaccagtgaccttggaaggcgtcccaagaatagctgatgtagttaacttgatggacttattgagtgagatggatgtacattgtgatttcggtgaaaccactttaagaatagatccaactgatatcaagatgagtccgttgccagctggtaagattaagagtttgcgcgcttcatattactttatgggtgcgctacttggtcgctttggcaaggcagtagtgggcttccctggtggtgacgatattgggccacgtccgattgaccaacatattaagggctttgaagccttaggcgctagcgtaaaaaatgaaaatgatcaaattataattactgcaccagaagatggtttgcatggagcaaaaatccatttaaagatgccatcagttggggcaacgatgaatattattatggctagtgtgacggcacagggccagactataatcgaaaatgccgcaaaagaaccggaaattattgatttagctaccttcttgaacaatatgggggcagttattcgtggtgctggtactgactctattcgaattgaaggggtggagcagcttaaagcacagattcctcatacgattattccagacagaattgaagcagggacttatgttgctttagctgcctgtattggtaatggcattcgcattcataatattatcgaagaacaccttgattcatacctggctaaagttgaagaaatgggtgtagtaatcgattcagatgaagattctttgtatgtttacccagcgggcgacctaaaaatggtccaggtgaagacagatgtttatcctggttttgcgacagatttacagcaaccaattacaccacttttattaactgctaaaagcggtgaaggtgtagtaatcgataatatttatcctaaacggattggtcatattgctcagttgcaaaagatgggagccaatattaaagttgaagataatattattttggcccatccaactaagcagtttcatggtgcggaagtaactgcaggtgagattcgagcaggtgcctgtctgatgattgcaggcctgatggctgatggtacaacaacgatcgacaaggctggtaatatcttgcgtggttatgatcgggtccaagaaaagctgcgtcaacttggagctgatgtaactatcaaggatgatcctgctgtaccgggtattttagataatatttagtaaataaaaaccacatggaaaatctccgtgtggtttttgtaatgatatgtcgatttgtaggtgaacaaatgagtttaatttttacaagacgtgcacaaaattcagatgtggataaaattgtgcaaattttaaatgatgcgacttcttttttaaaggaaagtggctcatcgcagtggcaaagtggctaccctaatcgagcaactgtagaagatgatattaaaaatgggtgtgcttgggtattaactgtggataatgaagttgcaggttatgcggcagtggtaattggccgtgagccaacttatgcggatattgaaggcaagtgggaaaataatgtggacacctatgcgacaattcaccgcattgcagtttctagtaagtttagaggaatgcatttgagtcaatttttcttgagcaatattatttctctaacttatgcacaaggaattcacaattttagaattgatacaagccggaaaaataaaattgtccagcacattgcagttagtcataattttattgaacgagggattattcaagtaactgaagatccggttgattcaagtagaatagcttacgagttgaatttaaggtaatgaaaaaccacatgggatgtgaattccatgtggattatttttttgctttatttattaatcaagcaagtcgtatttcaaagtcattaaaccatgaccttcgtcaaccatttgaccaagcagttcaacagtgttgttataaactgtatcagacatcttttgattagcagcaattaacttgtcttgtaattccttacctgaaaggttctttgcttctttgtcagtatcatgttggatcttgtgacattgtgctaaactcttttgttcaaaggcgtcttcaagttcaccgtaaacacggtagttggtatcgcctaattgagcagttaacttgttaagccagaaaatcttgctcaagttaaacttaggagtggtttgccaagcttcaggggtagtagtgatattagtatagaatggcaccattgagttaaaggtgttaggaccaaaggctaaccattgtacacctgcaatttctgcaggaacatcattacgaatttgcaaaatatgggtttcaaagtttctgttaataccgataggacggaaggtcttcttttgttcaggagtaccttgatcgccataagcatcgtaaggagtgtcttggtagtgtgagctttcggcccatttaatatcttcaattgagattaaacgattagcatggcagataaaaggttgatcttgatctgctggagtaccaccaaagtctggatcgaaatagttgtgaatataccaagcacgaggattattgtagtgagcatccttaatagttgaagaaccaaagatgtggcgcatgttgtagccttcacggtctggattcaagtgatattcttcgattaaatcctttaggtctgctgaacaagcaaaattatcagaatcgttgaagtcgaaagtatcaatattcaaacggtttggtgcaataacatatgcatcatctgggatacggcgtgcaatccaatgatgaccaccgatagtttcaaggtaccaaatgttatccttatcagaaaaggccataccgttcatttcataagtaccgtatttttcaactaaatagccgacacgtttaacaccgtcaaaagctgagtgcaagtatggtaaagtcaaagtgacgaaatcttcttcaccaagaccaccttcacttggatcaagtaatgggtcaacaccttggatgcgtgaattagtagtgatggtttcagtagcggtcatggctacattttcagcgttaattccagctgcgccccaaataccatttttgcctgaaacatcaggtgctgaagtatagcgtaatggtgtttctgctaaatcagcgtcgtcaatcttttgtttagaaattacactagtgtagtgcttaggttggtcagctgggttaacagctttaaagccttcagggatgatgacgcgaccaccgtcttcactacgagcgatcatcgtagagccatcaatagttgcttttttaccaactaaaatagtagtacattctgtttgtttcattggatcattcctttacttttattatgtttaaattatttcctaataatattgtatgcaaaaataatccgataaggcaaagaatataattaatttccccgaaaggcatttggactaacaccgctatagcgtttaaatgccttggagaaggtaaattcatcgccgtagccgactttttgagcaacttgccttagattgtgcttggtattaattaattcttttttagcggcttccatgcgcaattgcatgaggtacttttgcggcgataatttagtgttttttctgaacaaagcatataaaaagctgcgtgatactcctagcctatgacaaagttcaacaatattgcaggtaggatcggtataattttgattaagataattaatagcgatttgatattgatcatttttaggtgttttgcggactggtggatggttaggaaagtcttttactagatgataaaaaagttgataagttaaagctgaaatttttaaattgtttaataaggtctttttcttcgccaaacattgataaaggtcatctagggtttgataaaaggcagttttttgaatttgacgcaagaaatttttattaggtaaatttgatgccttgatgctttcattaacgccgttgccagctaggccaatccagaagtattcccagggttcattgtggtcagcttgaaaggaacaagtttgactgcgtggaacgtaaaaaagatcgccagcttttaatttaactgagtggtgtctactagaagtaaaggtaccagttccgctaataatgtaataaaaaatatcgtttttacgaagattgtcaccttgaaagaattcatcgggctgacatttttgtcgaccataaaacatgatgtagctatcaagattttggttatttaagttaggcatagacttcctcactgttgaaaaattatgttacttctattatagaagagattttgcttaaaaggtgaagaatgaaaaacgaccacattaagcggtcgttcgtgaatatttatagaaaattatgatatggaattatgaaatgaaaaggtattttacttattggcaccacttcttccattgaataaaagattaagcagagttgcacagatgctggctacgacgataccgttgcctaagaacaattgaatggtttgggggagagtttggaagatttgaggatagacagtaacgcccaatcccatcccgattgaaatggcgacaattagaatattgcggttgttctcaaaatcaactttggttaacattttgattccttgcacggcaatcattgtgaacatgaccaacatggctccgcctaaaactgagtcaggaatgatggtaactagagcaccgattttaggaagtaagcccatggccattaataagccagcagcccagtaaatcggacgcttagtcttaatgccggataattgaagcaagccgacattttgagaaaaagtagtgtaagggaaggtgttgaaaagcccgccgaagatttgtgctaatccttctgcacgataaccttttttgaggtcttcttcggtgatatcttgatgaagtaggtcgccaatggcaaagaagacgccagtggattcgaccaaggaaactaaggcaatgatgatcatggtcaaacaagatgaccattcgaattctggcaccccgaagtagaaaaattgaggcaaatggaaccaagaagcttcggcaactggctttaatgaaacaagtcccatgcagctagcgattagagtaccaacaattaatccaattaaaacggaaatggaacgtaagaatcctttagcccagacttcaatgacaacgatgatgaggatggtgataaaggcagcaataagatttttcgcatcaccaaagtccttggcttgggcatttccgccacccatgttttgaaaggccacgggaatcaaagttagtccaataactgtaattaaggtcccagtaactactggcgggaagagttttttgatttttgaaaaccatccggcaattaagaaaacaaagattccagcaacgataatggcaccatacatcgtgttaattgaaaacttctgcccgatcatttctaagggagctaccgcttgaattgcacagcccaaaacgactggcaagccaatgccgaaatatttattacggaatagttgaattaaagtggctaaaccacacatgaagatatcaatcgaaactaggtaagtcatctgtgtgctattgaagtgtagtgccgtaccaattaaaaggggaacggcaactgcaccggagtacattgccagcaaatgctgcaaacctaggacagcagcttttttgtgactaacttctttttgtgccatttttaattattcttctccctcgaagtgtacttgatcattttcaaagctatcgatttttgctagggcttcaaagcgtaagccttcgttttctacccattcgcttccgccttggaaggtttttgcaacaacagcaccaactccaacaatgtcgcagccggcttgtttagcaatgttaaccatgcctttgactgcttcaccgtgggcaacgaagtcatcgatgattaagatatgttcgcctgggtgcaaaaatttctcttcaacgcagatcttattgttgaccttcttggtgtaagaaaagacgtcagcccaataaactgcatcattcaaagtagacggctttttctttctggcaaagatcattggcacgtgcagttggtaggctgccatgacaccaggagcaatcccggacgcttcacaagttaagaccttatcgactttttcatctttaaaaaggcgggcaaattcttcaccaacatgcatcattagttgcggatcaacttggtgattcaaaaatgaattaattttaagcacatttccaggtaaaacttcaccatcttgtttaattcgatctactaattccttcaatattattctcctcaagaaagaaataaggacttcttctacctaaaacaggtaaaagaagtccttaagattattcttaactttcattcacctatagtccggtatttacggtaccgggtagagactgtcgaccttatttcgacgatatatagatatttgtgttggcttaatcttaacagaatatattgccgaacacaagtggaaaattaaggattaatgttcgattatagtaaaaattattcagctgcgatatcgttatggcacagactgatgatcttttcgataatgccatataagatccccgcgattggccagatgatccagctgcgttcccaatcattggtaatgaagctatatcctagataaagtaagactgctattaaccaatagagtgtggcgtatttgttcataatcttgcgacagccggttaattggattgttaaattgcccaggtcaagcataatagctagggcagtagaaaagcaaaggatggctggactgcgaataattaaactaatggctaaagcgcgaaggctggcacttttttgagcagctgttaagtagccttgctcttgttgatcagataaaattggcaattcttcagttaagttattatctttgtggtttaattcaaaagaaggtgagccgcttttgagtaaataatcggtggtcactccaaataattctgataaagctacaattttttcaatatcgggaattgattgttcactttcccatttggatacagcttgccgactgacattcatcttttcagctagtgcttcttgaaaaagatgatttttcttgtgtaatgccgcaattttttgacctaatctcatgattgatcgtcctttcgttttgaaataatttgatttaacgaaaatttgcggttgcagaccaccactttttaattgcatttagcgcaactagtagttgcaactgctggttgctcaagataaaagccgaacaatgaatggctatttttaactttttgattgacctttttaatttttcctagtagagttagttaaaaatgcgtaattgaaaagagggagtaaatagtggctaagaatctagacgattttgataaaattattgtgcttgacttcggtagtcaatataaccaattaattacccgccgtattcgtgacttcggcatctattctgaacttttaccacacgatctttccatggagaagattaaacagatcaatcctaagggaatcattttctcaggtggtcctaacagtgtttacgataatggtgcattaaaggttgatcctgcaatctttaagttggatattccaattttgggtatttgttacgggatgcaattaatgtctcatgacttaggcggtaaagttgaacaagctgaaaacaaggaatatggccgcgccaacattacggttgaagatccagacagtattttgttcaatggcttgccttcaaagcaatacgtttggatgagtcacggtgatttggtaactcaagctccaaagggcttcgaagtaactgcctcaagcaaaaactgtccaattgctgcaattgctaatccagataaaaagttttatggcattcaattccacgcagaagtgcgcaattcagaatacggtttagacatcttgaagcactttgcttttgaggtttgtggtgctgaggctaactggaccatgaacgacttcatcgacatgaaggttgatgatattcgtaaggaagttggcgacaagaaagtcatcttaggtctttcgggtggtgtagattctagcgttactgctactcttttacacaaagcaatcggcgatcaattaactgcaatttttgttgatcacggaatgctgcgtaaagacgaaggcaatcaagtaatgcaagccttgaacaaggatcttggtgttaacatcattcgggttaatgcccaaaagagattcttagacaagttgaaaggtgtaactgatcctgaaaagaagcgtaagattatcggtaaggaattcatcgaggtctttaacgaagaagctaagaagttaaaggatgtagatttcttagctcaaggtacgctttatactgatgttatcgagtcaggtaccaacactgcccaaacgattaagtcccatcacaacgttggtggtcttcctaaggacatgcatttcaagctgattgaaccactgcgtaagttgttcaaggacgaagtacgtgaacttggtgaaaagctgggcattccacatgacttagtatggcgtcagccattcccaggccctggtcttggtatccgtgttcttggtgaagtgactgaagacaagcttaagattgtgcgtgattctgatgcgattttacgagaagaaatcaagaaggcaggtttacaagaaaagatctggcaatacttcactgttcttccaggtattcgctccgttggagtaatgggcgatggacgtacttatgactatacgattggtattcgtgccgtaacctcaattgatgggatgactgcagattttgcccaaattccatgggatgtacttggtcacatttcagatagaatcgtcaatgaagtagataacgttaaccgcgtagtttacgatgtgacgagtaagccaccttcaactattgagtgggaataatttcgtaccttaataagaagaggaaatcccaatatgacggcatttgaatagggtcaatattagtggaaagtaccggttgaaagcaagttgtctaccgtttttctaccggtagaagttgattttaatcagcatgaatagtgcattaaacgctactattacctgttcgttattttggggttgtctaccgaaaattgaatattttgcttacttttgttgaaaagtaagtgactgttgtcctacttattgtcatttgataagtggggcattttttttctctttgttgccacaaaagaaatgctgaaatccaaacggagcagtctgtttgatcgttgttgttacttatgacgaaaacataagtaaatcagatatgaaatctcgaaatgaccttgaatgaaatctcaaggtactcattctcgaatgcaatatctgatcggtcgcaaccgaaggctgaaaatttattttgccgggacggcaaacatgagggggtcattgcacgatgaagccgttaaaggatgagctaattcaaagtcgacttgatgaagatgaattagcagattttgataaagtgaagaaactgctcgatgtgaagagtaattctgttgcaattcggcagatgattaaagatgaaatgagaaagccagaaatgaatggaagcaaggtaatactgacgttgtatcagcgttattaaccaagctgtctgctgaaggtcgcctaccattgtcagaggcgttgatgggtattacaggtactaaaacatcatcacaattgagtatcttacaaaatcagttcgccgatattcaatcacagttagaaagtattatgtattcagtgacaaaaatggtcgattgaacaagtggctcatgtagttagaatcgcctacaagaccatctacaactggattgagcaaggagtattggatattggcgtggctgatttacctgaccatggaattcgccgccgacgagccaaagaaacccgtgggacttttagccatggacgttccattgaagatcgtcccgctgaagttattgaccgtcatacctcaggtcactttgaagcagatacagttttatctggaaagcgtaaaggtcaagcaatagctacgtttgtcgagcgtaagagtcgtcttatcatcgttaaacggcttcagggacgagatagtacctcaataaccaaggccattttagaattagctaaccagttagaagataatctcaagccccttactgttgaccatgggaaagaattcgctaactacaagctaattgaaaagcaggccaggattcccctatactttgcgcatgcttattctccacatgaatggggcagtaatgagaatcgcaaccgagtactacgacgctttatcccaaaggtcaaccgattgagaaaatcactgatgatgagttaattcaaattaactggtatttgaactccaggccactcaaatgtttaaactggcgcacactaattgagatctttttgcgtaatctgcgtcactaactttgttcaagttatttcttgcaatctgccgtttgaaaagagattagccttggcggttagtctcttttactatctggtaagttgactgcaaacagaaaaaagagccaagccgtcatcaaagtcgctaaaccgtgctataatgttgtcggatttaaaaataccactagttattaaatttgggaggcaaaaataacgatgaagcaacttaaatttttagaaactaagcggacaccgcgttatagtttgcgtaagtttagcgttggtgtggcttcggtattattaggagtaaccatttttggaattaactttacaaatcattctgtaaaggcagcaaccatagaaagcgttaaaacttccaatagttcaccagagacgcaaggtagtgcaagtaacaatgcaacagctaataattctacagaagctgcgacaaccccacaatcttcaccagaaacgcaaggtagtgcaagtaacaatgcaacggctaataattctacagaagctgcgacaacctcacaatctttaccaaagacgcaaggtagcgctcacacttatattagatcattagcagcaagatcagcagcaagattagcagctacgaattttatggtaacttctggttctgacagaaatgcagcaggtacagtagatcaaaataacattaatactcagctagctaaagaaaatcaagaattggccaataaggctaatctaacttcttcagataactacagttctaatatctataaaggtacagatggaaattattacaagattgtaactatttatggtcaggactacgtttaccgtgctgctgatattcaagctagtggtgctgattttaagggggatcctaaacaaacagctgaagatactaaaaataatatcaatatttctaaagaagatttaggaaatggtaagacccgttggaaggttgttttcttccctaataagggattacaaaatgttggcagtaaattaagtgggttaagttctgcaaaatttggtattgccctcacttctgactaccaaatcgttggtaatgttgacatgaaagtaattagtaatcctaatcaaacatttgaatcttatacatttgagcccggtagcactagcgctactgaatttccaatacaaaatctaaaaactgaaaaagacttttcatttaatcctaagacagatgttgatccaaatactggtttaattaatagtgaaaccatgccagcttataacaatcaatatttgcaaggcccatactatttcactactgctactgatgttggtgctaagaacttatggcagacttactttaaagatgctgatgaacgtaagaatgcatatgatgggtccccttatctaggtggcaatcatgactttcattttaatacttttaaaattgcaaatgaaactggagttgacggtgcaaaatataaagacccaatcatttatgacaaactggggtataggttaaattctaaaaacggtgtagctaattctaatggcgtatatagcagtgataactttaaccaagcaatgtcatttaagtcacaaggtgtcactagtaatgcacaattttcttcttatgttatttcctttactacgcaacacacagactctcatgaagtagaattaactacaggttcgaaaaatcaacaattctcaggaatcgcagctaatatttattcttatcagaattggtactatagcatgatgtctagcttatatggtgagcagagagcactggatccagctggtgcaccaaaaacacctaaagatgttatttctggttgggttgatgccactagagctctggatgagattaagaaagactatttaaataatgctcaaattaatgttttgcggaataaaattctaaataacattacagactctgatgctgtaaataacattattaaagaaggaaattccttaaacgatgctatgaaaaatcttggtaatagtatcggacagtatgatcctgatggcagttttgctgatcacaaggaagatacaacaaagaaatctgatcgctataaatacgcaagtccagataaaaaggcagcttatgacaatgcaactgaagtaactaaagctttgattaacaaagatacaggtacctatgcagatcaagcgacggtagaacagcttactaaagatgaaaatgatgcttggaacgaacttaatggtgtcaagccaaaggataatgaggttaactctccggtcggtggtaccattactattgaaaagggacatgcattagattcaactgatgccgctaatgcaattaccaataaggatagtttgactaatgtaaaaagttattcttggtcgggtactccagatacaagtaagccaggatctattagtccaaaagtaatagttacatataatgatgatagtgctgatgaagtacctgtaactgttaaaataaaaggcgatgctgacaagtacaagagactgtaaaatagtttgtgtaaggatgaatgattccttaaatttatttctttaaacattagaaaaaggagttcctttctcgtatgattggtttgaacaaaaaaaacacatacagaaagaagaactccttcatgaatgattttaccaaagattttgctcaagctctattcaatccagacaaaataaatgatttattgcgcaaagagctacaacaggctgttaataacttgctagaagctgaattgactgcctttctaggctatgatccctatgccagaaatggctggaatactggcaattctagaaatggtgcttatttccgcaaggttgatacgcagtttggaccaattgaagtgcaagtgcctcgagaccgcaacggtcagtttcatcagcacacgctgcctgactacaagcagcactcggatatcttggaaagcatgattatcaagctttactccaagggcgtgaccaccagggacatagccgatctaattgaaaagatgtatggcagccattacagtccagctcaggtatcaaatatttccaagcagatgattccaaaggttgaggcttaccacaaacgcaagctaagcgacaagtttttctgcgtctatttggatgcgacataccttcctttgcgccgagaaacatttgagcgtgaagcagtctatattgccattggcatcaagcctaatgggcacaaggaggtcattgactactgcattgcacctagcgagaacattgaagtctggacagatatgcttcaaaacatgaaatcccgaggcttaaagcaagttgagctttttctttctgatggtgttgttggcatgaaaacagccttggccaggacttatcctaaagctcattttcaacgctgtttggttcatgtcatgcgcaatatctgcgctaaagtacgcgtcgacgatcgtgaaaagatcatgaacgaattcaaacaggtgcatcaacagacaaacaaagaagaagccacagctgtcctgcatgacttctataccaaatggggcaaggtttacagccatgttatcagaagcttgaaagacatagaaccagatctgctggtcttttataactatcccaagcagatcagagcttcaatttattcgactaacatgattgaatcatttaacaatgtgatcaagcgcaaagctaagcctaaggcagagtttccaactgaacagtcgcttgatgcttttattggcattcaggcaatgagctacaatgaccgttatttcaatcgaattcataaaggctttggtcaggttcaggacaccttagaatcctactttgattaaataaataattaaaaaatcaatttacgagaaagatctatttacacaaaagatttgacagtttctgatatagtacctgttaagattaatgttaaaaaagatgcagaaagctacactgtaactcctaataatgaagtttcagttgataagggagaagatgtagatccagctagcttagtaacagtaaccgatccagatggcaagcaagtacaactaccagcaggttcaattgactggaaggatggcgcaaagcctgacttgactactccaggtgataaaactggtagtgttgaagttaccttcctagatggatctaagaaagacactgatgttacaattcatgtaaagactgatgcagaaacttatgatccacaagcccaaccttggactacaactgttggcaaaacgcctaaggctgatgaagtaatttcaagcactgataagaatggtaagaagatgccaagtgatgcaaaatacacttggaagactgaaccagacacaagtaaaactggtgaggcatctggtgtagtaaaagtaacttacagtgatgaaagccaagatgaagttcctgtaactattaacgtcaaggataagctagatgacaaggaaaagtaccacatctatggcaaagatggtcttaaggtagataagaacggtacattagctccacaagatgctatcgatgtaaaggatgctgatggtaataagactactttaccagaaaactcaatagtagaatggactaagaaacctgactttagtcaagctggtaaggatgtaactggcgaagtaactgtaacttatccagatccagatcacagcaaatctgatccagtaactgtaactgttcatgttaatggtaaaagtgatgaatacaaggttgcacctagagatggtgtaactgttccaagaggtagccaagttgatccagaaagaacagttgttgctcaaactccagatggtcaaccagctagtttcccagatggaactacacataaatgggtaactccccctgatacttcaacaactggtaatcgtacaggtgtagttgaaactactttcccagatggttcaactactagaactacagtcactgtaaaggttcagccaaatcaaagtgataaatatgatccacatggaccagagaatccagatgatagagtcccagtaaaaaatccagaccacttaactggtggtgataaggataatgttaagggtgaagttggcaaagtaaatccagatcttccaaaggatacagaagttacagtcgatgataagggtaacgcaacgattatctactcagatggttcaaaggataaaatcccaggtggggatttggtacgtccagaaaaagacgctgataaaaatgatccaaaaggtccaaagaacccagatgatagagtcccagtaaaagatccagaccacttaactgatggtgataaggataaggttaaggatgaaatcggcaaagaaaatccagatctgccaggtacgattgatgtcgatgataagggtaatgcaacgattacctacccagatggttcaaaggatacaatcccaggtggagatttggtacgtcaagaagataaggacaagtatgatccaaaaggcccaaagagcccagatgatagagtcccagtaaaagatccagaccacttaactgatggtgataaggataaggttaagggtgaagtcggcacagtaaatccagatcttccaaagggtacagaagttacagtaggcgatgacggtacagcaacaataaaatacccagatggttcaaaggataaaatcccaggtggggatttggtacgtccagaaaacgacgcagataaatacgatccaaaaggaccaaagaacccagatgatagagtcccagtaaaagatccagaccacttaactgatggtgataaggataaggttaagggtgaagtcggcatagtaaacccagatcttccaaagggtacagaagttacagtcgatgataagggtaatgcaacgattacttacccagatggttcaaaggataaaatcccaggtggggatttggtacgtccagaaaacgacgctgacaggcatgatccacatggaccagagaatccagatgatagagtcccagtaaaagatccagaccagttaactgatggtgataaggataaggttaagggtgaagtcggcacagtaaatccagatcttccaaagggtacagaagttgcagttggcgatgacggtacagcaacaataaaatacccagatggttcaaaggataaaatcccaggtggggatttggtacgtccagaaaacgacgcagataaatacgatccaaaaggaccaaagaacccagacgacagagtaccagtaaaagatccagaacacttaactaaagatgacaaggataaggttaaggatgaggtcggcaaagtaaatccagatctgccaggtacgattgatgtcgatgacaagggtaacgcaacgattacctacccagatggttcaaaggatacaatcccaggtggagatttggtacgtccagaaaacgacgctgacaatatcacaccaaatattccaggcgataaagttacagtcaaggacccaagtcatttaactgatgatgaaaagaatcaagttaagaacaacgtcgataatgctaacaaggataagttcccagcaggcacagttattacagtaggcgatgatggtacagcaacaattacctacccagatacgtcaactgatacaatccctggtgataaattagttaagggtgaagatagcggctcaacttcaggacaaacagacgctggcaatatcacaccaaatattccaggcgacaaagtaacagtcaaggatccaagtcacttaactgatgatgaaaagaatcaagttaagaataatgtcgataatgctaacaaggataagttcccagcaggcactgaagttatagtaggcaatgatggtacagcaacaattacctacccagatggttcacaagacatcataccaggtgaccaattagttcaaggccaaaagggcgacacaactgatgctggtaacattacgccaactattccaggtggcaaggtaactgttaaggacccaagtcacttaactgatgatgaaaagaatcaggttaaggataacgttgataatgccaacaaggataagttcccagcaggcactgaagttacagtaggcgatgatggtacagcaacgattaaatacccagatggttcacaagacaccataccaggtgaccaattagttcaaggccaaaagggcgacacaactgatgctggtaacattacgccaactattccaggtggcaaggtaactgttaaggatccaagtcacttaactgatgatgaaaagaatcaagttaagaacaacgtcgataatgccaacaaggataagttcccagcaggcacagttattacagtaggcgatgatggtacaactacagtaacttacccagatggttcaaaggatgtcattgctggtactgatttagtcatcgctgctaaaagcgaagatgttcctggaagcaagcatcattcacataagaatggttcaaactctagtcaagctgatggagttaagggagcttctactgctaatggcagcatcgcaaacgctggtaacaacctaggtgttaagggtgaaagtgataatgccattggtaataacaaggctactagcttaaagacattaccacaaacaggcactaaagatacttcaattttgggtgtgcttggtatgcttttagcttcacttggtctattcgtatttaagaagaagcgcgataaagaataatttataatagttttttataaattctattggtaaaagtatctagagaaagttaattctcagatttaaaaagacgatcgaaaacttttgaaaaattgtttttgatcgcctttttgtgtgaaatgaaaacaagattctacgtaagcgtaaaataaccgagtatctagattagttttagatttcaattatgattaatttatcaatattttggaggttattcatatgtcagaaaaaaagctaatcgtccctcttgttcgtgagccaaaagctaaaaagtctaagccagctcgtaatcatttactgctttctttaaagaaaaatgacctagaattagacttccaatgtcattaagttaagctattgacttttgaaaactgatctttttaggaatcgaatcatttggattcgattcttttttttgcaaaaataaaggcgaaaagacaaacgaaatttaaaagccaagtctgcagtatattacatgtatcgcgtggcctaattaaaaaagaaatacaaactacgcttatttagcatacgcaaaaaagcatcaaattggctatctaaagccaaatgatgctttaattgtttttttctccaatgtcaatagcttaacttaatgacattgattaaatttgcgggctttatttatttttatattgccaacccaacaagcgagaaaataatttcactaattagtactaatagaacatttactaagatgcctgtaaaggttgattctttatgtggattttttacgaaagtcttagttgtgtggtaaacaagcggaatagtaagtaaactccctaaagtaataactggcaaatattttaatactattaccaatattaaaaagatgtaggctaatacatagtaacaacataaaatagtcagggcagtttttcgacctgtatagtagggcaaggttttacgtccgattttgacatcttcagtcacatcgcagatgttgttggctaacatgacattggcaatgacaaaaattgccggtccagcaacgataatggctttagcccagaaaaaattatcgaagggatgcacgttatacatgttgatatataggcctaaaaatgtaatgttgtagcccattgtaattcctgaagctggttcaccaaaaggagtttttaaaatggggtaagggccacctgagtagcaatagccgattagatagcttaaaatcccgattaataaaataatccaaccgactttaatgctaaggatagttccgataattgcagaaattaacgtcaaaataatgattatttttcgagcccagcttttcgtaatattaaatttctctaggatattgttgtagctagttatatggttttgcttataacgtgcgtaatctgtgtattgattatgaccattaactgctaaatgaaagcaaatcacagctaaaaatagccataatgaatagactagattaaagttgtgataatagtagctagccatcaccgagccgataatatatggcagagccgagataataattgtttggatttggaccaaggcattgaatttttgtagtgtagaatattttttcattggttcctccataagtattaaatagccattatcttcagtataaatagatagttataatttacaattatcttgggtagaaatcttattgtttagaattaagaaagcttaatattattttttgtggtggtcgatgtaagtcagcaaagccaacaaaagcatcaaaaagctactctcgtaaaccgacatggttgaactctttctgtagtatgttgaccattgttaaaaaaggtgaacgcgtaaaatactaaatttttactctaacaaagtgtctgggaaaaagtttatttttaattaattttagactttcactcaaaaaaatcctaataaatcaaggtttattgataccaagatttattaggatttcttaatttctgagtttttcccagacactttatttagactattttcttaacttgtgcaccttatgggctagaaccatttctttattgcgatcttcatagatcatatccttgatgtaattccatgggattaacaaaggcgttttgctatttttacggaaaatgaagtctgcgtgtcgtctttccaagtgacgcaaatatcttttagcattttgaatcttagtatggtgttccaaatgcaatcgtggttcgaaatcgacgattttgtgttcagcgttgaaaataggtctaactttatggtgccagttctcagcactagagatatgatcgctgaccttttttccggcttctacgatattctctttggttgctggacttttctgatccttaaactccgcatgtggatctagatagtagttgcccaaaccatcttgacgataaagtcgtattttcttgaatgtcttatttttcttatccattcttacttcgataacgtcaccatttttgtgattcattaaatacatgtgatgttttctagtgtaatttgcacttttcatgatcagaaatctcacctctacattaattattctgaaacgatattataccagtattttaactatatttttgctttacgagtataaaagtttataatttttaaaaacccggatttaaaattgaagtgcaacactaagtgttaaacaaaaaggccatgaagacctaaacttgaagtgacgaaaaatcaagaaaggaagatcttcatgaccaattcaaattctagcatttctaagcactatcatcaattaaccagcgtacaacgtggacaaattcaagcaatgctggattccggcataacttcccgtactgttatcgctcaagaagttggctgccataagtcgacaatcagtcgcgaaatcaaacgcggaagcgtcctgcaaagagacagcagctatttattgtatgagcactattacgctgatactgcacagatttattatgagaagcgtcgcaaaaactgctatcagcgcaatccattgaagcattatgctgtctttttgagaatgctctccagacgctttaaagctaaatttgatgccaccagcatcgatgagttcgttggtgaattcaaaaggactatgccaggctacccttgtcccagcacaccaaccgtctatcgctatattgatcagggcttgctggacataagcaatattgatctgcctatgaagctcaaaagacgcaggaacaagcgtcatcacagccatggcggtcacgctttgcacaagaagcatcttggcaattccattgaacagcgtcctaaggaggttgaagacagaaaagctccgctgcactgggaaggagatctggttaaaggcgtcagacgcaagaatcagcctgctttaatgactttgactgaaagaaccacacgctttgaagtagttatcaagattcctgactatcgggcaagcacatgccaaaggctgcttcaaaaggagattgacagacatcctgcctggtttaaatcaatcacgtttgacaatggctctgagtttgcggatatgaccaagatcaagggctgccagatttactttgctcacccatattctccatgggaaaggggcaccaatgagaactgcaatggtcttttgcgtcaattcttccctaagggcaagagcatgaaagacaagtcaaaagcttatgttcaacaggcaactgatgccattaaccacaaatatcgccgaatcctccaatatcacacagcagaggaactcttcaagcaatatatctcttcataacctaactgttgcacttaatttgacaattcaggataatttttaaaaagaaatttcaattcttgagaattagagaaggaaaaaagagactgtaaaatagtttgtgtaaggatgaatgattccttaaatttatttctttaaacattagaaaaaggagttcctttctcgtatgattggtttgaacaaaaaaacacatacagaaagaagaactccttcatgaatgattttaccaaagattttgctcaagctctattcaatccagacaaaataaatgatttattgcgcaaagagctacaacaggctgttaataacttgttagaagctgaattgactgcctttctgggctatgatccctatgccagaaatggctggaatactggcaactctagaaatggtgcttatttccgcaaagttgatacgcaatttggcccaattgaagtgcaagtgcctcgggatcgcaacggtcaatttcatcagcacacgctgcctggctacaagcagcactcggatatcttggaaagcatgattatcaagctttactccaagggcgtgaccaccagggaaatagccgatctaattgaaaagatgtatggcagccattacagtccagcccaggtatcaaatatttccaagcagatgattccaaaggttgaggcttaccacaaacgcaagctaagcgacaagtttttctgcgtctatttggatgcgacataccttcctttgcgccgagaaacatttgagcgtgaagcagtctatattgccattggcatcaagcctaatgggcacaaggaggtcattgactactgcattgcgcctagcgagaacattgaagtctggacagatatgcttcaaaacatgaaatcccgaggcttaaagcaagttgagctttttctttctgatggtgttgttggcatgaaaacagccttggccaggacttatcctaaagctcattttcaacgctgtttggttcatgtcatgcgcaatatctgcgctaaagtacgcgtcgacgatcgtgaaaagatcatgaacgaattcaaacaggtgcatcaacagacaaacaaagaagaagccacagctgtcctgcatgacttctataccaaatggggcaaggtttacagccatgttatcagaagcttgaaagacatagaaccagatctgctggtcttttataactatcccaagcagatcagagcttcaatttattcgactaacatgattgaatcatttaacaatgtgatcaagcgcaaagctaagcctaaggcagagtttccaactgaacagtcgcttgatgcttttattggcattcaggcaatgagctacaatgaccgttatttcaatcgaattcataaaggctttggtcaggttcaggacaccttagaatcctactttgattaaataaataattaaaaaatcaatttacgagaaagaactatttacacaaaagatttgacagtttcggaaaaaatcctaatgaagaaacttaatatattttattatgctaccatttggagttttattattggaatatgctgtgctacatatttaaacttaattaattttattattaattttgtctggcatgttttgtttgataaattacctgttcctagtcaggctttaccgttttttatttgtattccttttggtttcattattggtatattaattaagcgtttaggatcatatccattaactatcgaagaagttttaatgagtgttaagcaggagggaaagatcaattatcacaattggtggaaatccttaaccttaggtcttatttctttagccgcgggtggcagtattggaccagaggcttcaactactgtactaggaagtggcatggttaattggctgggagatagattacgactaattgcttattcttctgattggaaatggaatcatttttgggatactatcgtttcgaaaaaacaactaaaaaaactgccaaaatttagtagcctttttaaatcaaaattgtatcaaaaagttttttgcttaattatggttatgatcggcgtggttggtgcagcaatagtctttaaattattccctgaagaaggattatttggtattcatcatcgccatattctctggcaatggcgctatagtatgtatgtaattattctattaattgtaggttggagcttcggtatgtttttcttatggagcgaaaaatggagtgattattttgctaaaaaaattactatttcaccgattattaaagcaactatatggggaatagttcttgcattacttaccttaattactagttatgccctgtattctggtgaatttcaaattgttccatttgtacaccaggcgttgcaaatctcaccattatttttgctagttatagcagtcatcaaaaccttgtctactaatataggttttagtttaggctggcgtggtggaaaaattttcccttcgatttttgctagtgtagcagttggcgcagcgattgcgcaatttttaccaattatgccagttatgtgtgtagccattacagttagtgcaagtattgcagttatcttgggtaaacctttattaacagctattttattgattctgttattaccaatagagttggctcctgtcattttagtaagtgcgtatttatctgcctgtttgacaaaagtgagctatagttttagacaaaagaataattagggaggtatttttatgaacgaaaaaaacgatgcagtaactggtgcttctttgatagagaatcaagaagaaaaagtaaaaagcccatggccgggtcctaaaggtatgattcctgtaacaagtgggcgtgctgacgatgctaatgtacataatcgtgcctacttagacaatatcttggtggagatgcgtttgcttgattcagttgagccagacttaacaactgagatttttggtaaaaaatatgcctcacctttaactctggctgcagtctctcatttgaacagggttttaccagataagacgcgtaagccaatgcaagaaaaggcacgtgcggctaagaataccaatactttaaattggattggcatggagtcaaacgaagaatatgccgaaattgtcaaagagggcggcgatacagttagaattgtgaagccttacgcagaccatgataaaattatgggcgaactaaaacaagcagaagaattaggtgccgtagctgttggaatggatattgatcatgtgcctggtgataatggtaaatatgatgtagtcgatggtattccactaggaccgatttcatttagcgatcttgaaaagtatgttcatgcagttaaactgccgtttgtggctaagggcgtgctatccgtgcgtgatgccgttaaggctagagatgctggtgccaaggcaatagttgtttcacatcaccacggccgcgttccatttggcgtgccgccactaaaagttttgccagcaatcaagcaagcactaaatggcagtggaatgaccatttttgtagatggatcattgatgactggctacgatgcatacaaggctttggccttaggcgcagatgctgtactgattggtcgcgggattctttctgaattgttaaaagacgggcaaaaagcaacagaagataagattaagaaaatgaatgagcagcttgcacaaatgatgttatatactggcgttaaagatactaagtcatttgatcctagtgtgttacattttgattaggatagaaaaatgaaatagtttattttttacagtttactataattaagtggctattagcctataataaaggcgtttaaagctatactgaatagtgttatgcttaactcggacgttgttataaggtaattatttaaaagtaattagttgtatacgaaaacatgcttagctatggtaaaagctaagcatgatgtctcataatattgaggtgtctgggaaaaaactagcttccagatgaataaaaacgatcaagatttccttttttaagaatcttgatcgtttttttgttctctttaaaatttttaacaataaaaatcggcccttcagccaccttctttgacaatatttgttcaaattcatcatcataaaggcaattccgatatcggtttcgaccttctctttacctcgcaggtgcgttctgcgcatgccaaatacgttcttcaaatgtccgaaaactggctctacatcatattttctcatgccatagatgtgtctgccttcttcgctttggagaacttcttttgctttttcttttaaatattgccagttaggattatagcgaacttggcgctggcggccgctagctgttttagccaattgttccaattctggcgttagctggaactcgtctgcctcataaaccttaaaatcacggacctgaccagtagaacgatccttacgctggctgtaatatttgaaattgaatctgacgccatgatgatcaatgtaataatcatctttttcattgtagtaccagttgattagcttagttggatcattcttatactttctggtctgttctttttcatacatagtgtagggaataaagtacttcttgtctggatatttttcctccagcatcgaataattgtattcactgccatagccagcatcggcgacgattttgtcaaacttgtccaacacggtcatttgatccaaaaccggctccaaagttttgaaatctgtcggattaggaaagatggcataatcaactacatattgatcggtcgtgactgcttgaatattgtagccaggctttaattgaccatttttcatgtggtcttccttcatatgcataaaggtggcgtcatgatctgttttggaataactgttgcgtccggcaaagatctcttcggcttcttcatatttttgcattcttggcacataatcttttcttagccggtgcagaatcttttttagtccacgtcgcttggcttttcgaggtgaaccgccaggaatggctttgttttcctgctcaatctctttagtcagcttgttaatttctgcttcagtttcttgagctaattcctttagcccctgactagtttgaactttttctttttccatttctttgactacttctttagtaatcaattcatcataaagttcaactgcctggcctttcagcttttcatgatacttttcaaccgctttgcgccagacaaatgtatagcggttagcatcagcttcaatcttagtaccatcgataaaagcagcaccttcattgattaagccttcatcttctaacaggttagtgaagtagataaagctctttttaatcagttcattggcatggctgcttgatctaaaattattgatagtatgatatgaaatcttttgctggtcagccaagatcatcattggcagattttcttccagcatcaactcaatctttctgccagaaaaaactcttctggagtaagcaaaaagcagtattttgagcatcatggctggatgataggctgggcggcccgttttagcagtcttgcctactaaaacatcttctggaattgaatctacaaaccagctgatgacattagccaaatgattggccggaatggcaaaatctagattaagtgttaaagcagtttgacctgtgatataattcttgtacatgttagtttccaccttttttattttgtgatgatttaataatatcaaggctggagctaaaagtatacaaaaagagcgttgaaacaaaaattcaacgttcttttttcatgatctgagacttagttttttcccagacacttttattttagatgaaaataacaagttttcaaaaagtgagtatctatgttttgctattatggaaatggattgatttagaaaatgatgctattgaaatttcattatgagcggggatgcaaaaccttttttaaaaagcataagaatgagcaaaagataattaagcagttaatcgatcaagcgattactaaggaattggcaactggtatgactaaagtgaagatcgctgcaatgactcggattaagggaaaatcaatttacgagtttcgcctaaatttgaaaaaagcgggttcagcgagagtcgcttttgcagtaaaggatgagcaagtactagttcttttgattacctctaatttacagaaggatagttttagtcatgaattagaaactgttctgaaaggaagtcattatgcgtttaattccaattaagcaggcagagactttgctcaaaaaaatgtgtagtaataaaagtaaatatgtagaaattaaattattaacggcaaaaaaggatcgttcaattagtgtgaaaaatgatggtaaaaagctaattttaactgaagatggctatttgaactttacgcaggaatatgaattgactgatccagctgttggccgtcatgcagttttagcggcttttaaaaaggaatttccgcgtagtaatcgtgcatatctgattgctaaatagtatactttaactataagaaaaactatcagtgttgattagaaaggaagtctttttatcaatgaaatatgcagaaaaatctcccgcattatgggatgccattcatcatgaagaacagcgccaacaagacaccatcgaattaattgcctctgaaaatattgtttctgatgcagttcgtgaagcacaaggttctgttttaactaacaagtatgctgaaggatatcctggtcggcgttattacggcggttgtcaatatattgatcaagttgagcaactggctattgattatgcaaaaaaattgtttaacgcaaagtttgctaatgtgcagccacactctggatcacaggctaacatggcagtttatcaagcacttttgaagccaggtgatgtcattttaggtatgggcatggatgctggcggtcacttgactcatggatccaaggttaacttcagtggtaaggaatataagtcttacagttacggcctaaatgttgagactgaagaactagattttgatgccattcgtgaaattgctcttaaggttaaacctaagttaattgtagccggtgcttctgcgtacagccgcatcattgattggcaaaagttccgtgaaattgcagatgaagttggggcatacttaatggttgatatggctcatattgctggcttagtagcaaccggtcaacatccaagtcctgttccagtagctgatgtagtaactacaactacacataagaccttgcgtggccctcgtggtgggatgattttgtccaacaatttagaaattggtaagaaaatcaattccgctttgttcccaggcattcaaggtgggccacttgagcatgtcatcgcaggtaaagcgcaagcattttatgaggacttgcaaccacaatttacagattatattaagcaagtcattaaaaatgctaaggcaatggcagaaacttttgctgaatcggacaatattcgtgtcgtatctggtggtactgataaccatttgatgattatcgatattactaagactggtattaccggtaaagatgctcaaaatttactcgactctgttcacatcactaccaacaaagaatcaattccaggcgatcaacgttcaccatttgttactagtgggttgcggattggtacgccagtaattactagtcgtggctttgatgaagcagatgctaagaagactgcggaaatgattattgaaattttatctgatccagaaaatcccgcaacgattgcccacgttaaagaagaagttcaggcattaactaaaaaacatccaattgaataatttgtgtagcagaatttagccgtcctagttctcagctggggcggcttttgttataataaaaaattaaaaataatggagttaagagtgaaggaaacgtgattatttggaaaagttaaaaagacataaaataggcttattttcagcgattatgctggccttgaattctttaattggttcgggctggctttttggttcaggttctgcagcacaaattgcaggtccagccgcaattttatcttggattttaggtgcagtaattatcatctcaattgcattgacttatgtagaattaggttcgatgtttcccgaaagtggcgggatgagtcgatacgctcaatatagtcatgggccgttattgggctttgtggctgcttgggctaactggatttcactagtcacattggtaccgatggaagccgtagctgccgtgcaatatatgagttcttggccctggagctgggctaactggactaaaaattttattaaaaacggcagtattacttttgctggcttaggtgtggttattatttttatgctgatttttacaatgatcaattttgggtcagttaaaatcatgacccattttaccaatttgatttctatttttaagatcttattgcctactttgacgattacagttttaattgcttcaggttttcatggacaaaactttggcagtaatttacatgaatttatgccttatggtagtcggtccatttttgaagcaacttctgtttcaggaattattatgtcttatgatgcctttcagacggtcatcaatatgggtggggaattgaaaaatccgcgtaagaatattgtgcgtggggtattgatctcaatgttaattactgcggcaatctacattatgttgcaagtgacgtttattggtgcagttgagccaggcatgttagctaaagtaggctggcatgggatcaactttacctcaccatttgcggacattgctattattttaggcattaattggctagtgattttgctctacctagatgcatttgtttcaccatttgggacaggggtagcatttgtagctacggcctcaagagccctagcggcaatgacacacacacgtcatttgccaaaatggttaggtagattgaatcaaaaatacttaataccacgttatgcgatgattgctgactttgttttggcggttattttagtaagcttatttagaaactggaatttactagcaacagtaatcacggcctcaactttgattgcatatttgactggtccagttacggtaatgactctaagaaagaaaagaccagatcttgatcgtccatttaatcctggttatatgaagtggctagctccagttacctttatactaactagtttggcaatttactggtcaatgtggccaacgactattcaggtgataattgttattgccttgggtttgccgatttatttttattatgaaattcactaccaacattcaaatttaaaagaacaattacatagtagttggtggatgatcggttatttgatttttatgtcacttatgtcctttgtgggcagtagcggttttggtggtcagaactggattaagtatccatttgactttgtagtaattatcattatttctctcgccttctattattggggaattaagacagggttaaagaaaatcgatccttatgctgaaaaaattgcgcaaaataaagaataagtaaaaaaactgttgggatttttagtctcaacagttttttgttcgctattctgcttcatcaagatacttatttagcaccttgaaaacaccgttgtcgttattagtaggtgcaataaatttagcagtctttttaacgatatcttgaccattagccatggcataacttaaaccagcaaatttcaacatttcaaggtcattttcaccatcaccgaaggcaattaattcacttcttggcacgtctaaataagctaaaaattcctttagccctgcggctttatttacaccttcaggaataatatccatgtagctccaaccactagttgtgacgtggattttttctgtactacggctgttgaagccatgttctaattcatgtcgaatcttgctgggatagtccattgtgatcttagtgtattggtcatcagcaggaattttattaaaatcatcaatttcgatgctattaggataaaaataatgatgggaccgcttgtattctggtggtgtactttttaaaaagtaggagtgcttaacgccactaattaaaatgttttgggctgcaccaggatagcgtgcgtgcaaatattcaataaaatttaggatgcatttttttgaaaagcttgttgtacgaataatttttccatcgcgaactaagaccgcaccattgtcggcaacaaagtcaatagaatcgataaattcgctaaagtcatcagccaaacgaccagctgggcggccgctagcaataataaaatgtgccccgtgttgatgcagacgagttaaaatctcgctaaacatttgatgatcgtattgtttttcatcgttaacaaaagtaccgtcaacgtctacagcaacggccttaaagggaagagtagtcatctaattacctcactaaaatttgataccgttaacagtttaccatttcttgcaagtgcttacataaattatttatattatgtttaacaataaatttgaaatttacgaggtagaaaaaatgacaccatggtggaaaaaagcagttgtttatcaaatttatcctaagtcatttcaggacagcaacggtgatggcataggtgacttacaaggaattattgctcgtttagattatttggaaaatctaggagttgatgcaatttggctttcaccggtctatcaatctcccggtgtggataatggctatgatatttcaaattatgaagcgattgatccgcaatatggcacgatggctgatatggatgagttgattcagaaagctaaggagcatcatatccgaattgtaatggatctggtggttaatcatacatctgaccagcatcaatggtttgtggaggcacgaaaaagtaaggataatccttaccgagactattatatttggcgtgatcctgttgatggacatgagcccaatagtttgaagtctgctttttctggttcagcttggaaatttgatgagcaaacaggacaatattatttacacttctttgcggaacaacaacctgatttaaattggaaaaatccagagttgcggcaaaaaatctacgatatgatgaacttttggcttgataaggggatcggtggcttccgaatggatgtgattgaattaattggtaaagatcccgacaaaatgatccgtgaaaatggtccgatgcttcatctatatttgcaagaaatgaacaagaatacatttggtgatcgagatgtgatgacggtgggcgaaacttggaatgcgacaccgaagattgcagaagagtactcagatccagcacgtcatgaattatcaatggttttccaatttgagaatcaagctttagaccagcaggaaggaaaagaaaagtgggatttaaagccgctagacttaggcgaattgaaaaaggttttagtaaagtggcagacagagcttgattttaatcatgcttggaatagtttgttctgggaaaatcatgatattccgcgcgtaatttcacgttggggcaatgataaaaaatatcgggtgcagtgtgctaagatgtttgcgacagttttacatttgatgcacggcacaccatatatttttaacggtgaagaaattggtatgactaattgtccggtaaaaaatattgatgaagtagaagatattgaaagtgtcaatatgtatcatgaacgtctggctgaaggttatgacaaagataaactaattcatgcgatcaatgttaaaggcagggataatgctcgtcgtccaatgcaatggaatgatgagaaaaatgccggctttactaagtcaaagccatggttgacagtaaatcctaactacaaagaaattaatgtgaagaaggccttggctgatcctaattcgattttttatacttaccaagaattgattactttacgtcatgaaaatgagattgtggttaatggtgactttaagttggttcatgatactggtgatgaagttcttgcatattatcgtattttaggtactgaaaagtggttggtggttgctaacctatctggtgaagagcaacagtttacgtcgaccgatcgcattaaagaaaacttgcttagtaattatgctgtgcgtaatgatctgcatgatattacgcttaagccttatgaagcatttgcagtggcaattaaataagctaaaattaaaaagaacttgaattactaacttgaagatgttattctagttatcgttaatcgattaatctatgatctgtgatatgatcatggcaaaggagtaataaattatgaaacaaggtattcatccagaatttcaagaagtagttttcatggactcagcaactggtgctaagttcttagctggctcaactttgaagccatcagaaactattgactacgaaggcgaaacttacccattagtacgtgttgaagtttcatcagattcacacccattctacactggcaagcaaaagtttgctcaagcagatggtcgaatcgaaaagttcaacaagaagtacggtttgaagaagtaaaccttttatctggtggaagcagtcccattggggctgcttttttcgttagagattatttggcagaatgcatgaaagacagtataatgttttctgtataaaaatgtttttatgggagtaaatattcaatgaaaatgcaaatggcggaaattgccaaggctttaaatactacttgtgaaggtgacaatcaaactgttattacttctgttgcctttgactccagaaagatcacagatggtggattatttgtaccacttgaaggtgaacgtgatgggcacgaattcatagctagtgctattaataatggtgcttctgctactttatggaaaaaggggcatccgaacaagtcagaagatattgcggttattgaagttgatgatccacttgctgctatgcaagagcttgctcgctattatttgcgtaaggttaatccaaccgtagtgggaattactggttcaaatggtaagactactaccaaggatatgattgctgctgttttgtctaaacgctttaatgtacataaaactcaggccaactttaacaatgagattggtgtgccaatgaccattcttgagatgaagccaaatactgaaattttggtgcttgaaatgggaatggacagaccaggtcaattgcatcatttaagtgaattaacccatccagatgtggccgtaattacaatgattggtgaagctcatattgaattctttggcagccgcgacaagattgcagatgctaagatggaaattactgactttttgcgtgaagatggcgaatttatcttcaatggggatgaaccattattgcaagaacgtgctgagaaattggatcaagctaaagcaacttttggttttagagatgaagatacagttcatgcaactggctttaagagttatatgcatcatgctacctttacagttaatgattcagagcaaaaattctcaatcccaatgattggtaaacacaatgtttctaacgcaatggccgcaattagtgttggtcgtcattttggtgaaagtgatgaggaaattgcctcatcattgtctaactttaccccaacggctaatcggatggagtgggaaaaaggcgatgctggcgaaagcatcatgagtgatatctataactcaaatccaactgctgttagagctgtattgactagttttggccaagttgaagtaaaagatggtggtcgtagaattgctgttttaggtgatatgcttgaattaggtaaaaagtcgccggaattgcatgctggtcttgcagatacaatggatccccagattattaacgaagtttacttatatggctctgaaatgaagaatttatatgatgctttacaaggcaaatatgagccagaacatttgcattattatacacaagaacaaacagatcgaatgattgatgatctgaagaacgatattaagtcggatgacattgtagtattgaaaggttcgcatggaatgcacctagaaaatgtcttagcccgactgagataggagaaaaatttttttgaaattttcagaattaggattaaatgatgcgcttcttaaagcgattaaacgttcaggctttgaagaagcaactccaatccaagaacaaactattccccttgctttgcaaggcaaagatgtaattggtcaggcccagactggtaccggtaagacagctgcgtttggcttgccaattttacagatgatcgacaaaaaagaaaaagcaattcaagcggttattattgaaccaacgcgtgaacttgctattcagacgcaagaagaattattccgtttaggtcgtgacgaacatgctcatgttcaagtggtctatggtggagctgatatcggtcgtcaaattcgctcattgaaacaccatgtaccatcaattttagttggtacgccagggcgtttgcttgaccacttgaaacgcaaaactattaatttagatcaagttaaggctgtcgttctagatgaagcagatgaaatgctcgatatgggttttattcaagatatcgaaagtattttgaaatatgctaagaaccgacaacagacattactctttagtgctacaatgcctaagccaattttgcggataggcgaaaaatttatggatcacccagaaattgtccgcattaaagctaaggaattaactgctgatttgattgaacaatattttgttcgtgctaaagagtctgaaaaatttgatattatgtgtcgactaattgacgtgcagggtccagatttggctttagtctttggtcgcaccaaacgtcgcgtagatgaacttacgcgcggtttgcaagcgcgtggctacaatgcggcggaaattcacggtgatctatcgcaagcgcgtagaatgtcagttttgaaaagatttcgtgaaggtaagctagatattctggttgctactgatgtagctgcccgcggacttgatatttcaggcgtaacccacgtttataattatgatattccccaagatccggattcatatgttcaccgtattggtagaactggtcgtgcggggcaaaatggaatctctgttacttttgttacgccaaacgagattggctatatgagaaccattgagcaattgactaaaaagaagatgtcgccgcttcgtccgccaacagatgatcaggcattacatggtcaattaaagcaagcaaaaattgaaattgaagatttgatgaacggtgatttgggtaaatatacccaaggggcaagtgagctgctggataactattcagctctcgacttagttgcagcctttttaaagaacttggctaaagatgaggttaaagtcaagattaccccagaaaagccgttaccatacaagggtgatggtcgccgccgtcgtggtaaaggtcatggccgtagcaataataatcatggacgcgataaccaccgccgtcgtagtaacaataattcataccgccaaaatggaaaccgcggtaagcgtggtcgtggcaacggacatgaatttgtaatcaagaataagaaagattaggattttatcttaaaaagggaagttgtaatttttacagcttcttttttgtattataatgatgtcattgtgtgaggtgaaaataatgattaaaggagtaggaattgactcgattgaagttgaacgagttaagaagatcgtggacaagggggatgcttttgccaaaaaagtattaactcccaaagaatttgatcaatatcaaaaaatggcaggcaaacgtaaagttgaatacctaggcggacgcttttcattaaaggaatctttttctaaagcaatgagaacgggtctgggaaagtatattggttttcaagatgtcgaaactttatgggatgatttaggtcatcccgttatgacttcaactaagtttgatggaaatattttcccaagtatcacacatgataatcatgaaattattacatttgtagttttggaggaaaaataaaaatatggttccaggctatcaccgtccagccgttgtaaaggtaaatttgggcgcaattagaagaaatataaaaaacgaaatgaaacatcttgcaacagggcaaaagatgttagctgtagttaaggccaatgcttatggtcatggtgcagttgaggtggctaaaattgcgattgaggaaggtgcagcaggcctttgtgtagctattttagatgaggccttgcaattgcgtcatgctgacattgttaagccaattttagttttgggagtagtttctccagaatacgctccaattgcggccgcaaacaatgtttcattaacgattcctaaccttgaatggctaaaggaagcagaaaagtaccttgaaaaagagcagttacagttgaaagttcatattggagtagattcaggcatgggtcggatcggctttaacgaagatgaggattttattgctgctaataaattcttacaaaataacgataatttctacgtagagggtatgttcgcacactttgcttccgcagacagtgctgatgatacttactttaagcatcaggtagaaaaatttgctcatatgagaagtttgttgacagttaagcctaagtggattcacgtagacaataccgctgccagcatctttaacaaggatgtgcctagtgattgtgttcgttttggaattggcatttatggtttgaacccatcctctaatcctgatagtcctgacttgaagtcatcaatttcgcttgaaccagcattatcatttgagagtgaactaactcatgtaaaaactattcatgaaggtgacggagtaggatatggttctacctttgtagctgatcaagatacaattattggaactgtgcctgttggctatgctgatggctttattagaaagtttcaaggctttaaagttaaagttggagacgaatactgtccaattgtcggccgaatttgtatggatcaatttatggtcaaaatgccaaagaaaatgccgttaggaactaaggtagtcatcatttccaatgatccaacagcgccaaataatattaaggccgccgcagattatgttgatactattcactatgaagtagcatgtttgttaaacgatcgtttacctcgtgtttactatgaaaaataagttaggcaataaaaaagtgtctgggaaaaaactagcttccagatgaataaaaacgatcaagatttccttttttaagaatcttgatcgtttttttgttctctttaaaatttttaacaataaaaatcggcccttcagccaccttctttgacaatatttgttcaaattcatcatcataaaggcaattccgatatcggtttcgaccttctctttacctcgcaggtgcgttctgcgcatgccaaatacgttcttcaaatgtccgaaaactggctctacatcatattttctcatgccatagatgtgtctgccttcttcgctttggagaacttcttttgctttttcttttaaatattgccagttaggattatagcgaacttggcgctggcggccgctagctgttttagccaattgttccaattctggcgttagctggaactcgtctgcctcataaaccttaaaatcacggacctgaccagtagaacgatccttgcgctggctgtaatatttgaaattgaatctgacgccatgatgatcaatgtaataatcatctttttcattgtagtaccagttgattagcttagttggatcattcttatactttttggtctgttctttttcatacatagtgtagggaataaagtacttcttgtctggatatttttcctccagcatcgaataattgtattcactgccatagccagcatcggcgacgattttgtcaaacttgtccaacacggtcatttgatccaaaaccggctccaaagttttgaaatctgtcggattaggaaagatggcataatcaactacatattgatcggtcgtgactgcttgaatattgtagccaggctttaattgaccatttttcatgtggtcttccttcatatgcataaaggtggcgtcatgatctgttttggaataactgttgcgtccggcaaagatctcttcggcttcttcatatttttgcattcttggcacataatcttttcttagccggtgcagaatcttttttagtccacgtcgcttggcttttcgaggtgaaccgccaggaatggctttgttttcctgctcaatctctttagtcagcttgttaatttctgcttcagtttcttgagctaattcctttagcccctgactagtttgaactttttctttttccatttctttgactacttctttagtaatcaattcatcataaagttcaactgcctggcctttcagcttttcatgatacttttcaaccgctttgcgccagacaaatgtatagcggttagcatcagcttcaatcttagtaccatcgataaaagcagcaccttcattgattaagccttcatcttctaacaggttagtgaagtagataaagctctttttaatcagttcattggcatggctgcttgatctaaaattattgatagtatgatatgaaatcttttgctggtcagccaagatcatcattggcagattttcttccagcatcaactcaatctttctgccagaaaaaactcttctggagtaagcaaaaagcagtattttgagcatcatggctggatgataggctgggcggcccgttttagcagtcttgcctactaaaacatcttctggaattgaatctacaaaccagctgatgacattagccaaatgattggccggaatggcaaaatctagattaagtgttaaagcagtttgacctgtgatataattcttgtacatgttagtttccaccttttttattttgtgatgatttaataatatcaaggctggagctaaaagtatacaaaaagagcgttgaaacaaaaattcaacgttcttttttcatgatctgagacttagttttttcccagacactttttggtagatcagttttttaatccttaacagggtgttcaataaagacacctggattttcatcactcataatagtcatgccggcttgcaaatcttcgatttcagaaactacgaaaccttttctttgtaacttatcaacaatcgttctcatggtaatatctgagacaccagcggggagagtaaagagtgttcttctaacaaaattaccttcgagttcgccagcagctgcatcaagtgtcattacactagacatattagtgtgcttagacacaatcttggacatcttgatcaagttaccacgtgtattgtcagataaaacggtcaaaacgtatgaaccatttttaacatcccacgcatctgacaacatatcaagcattcttgagtgagtaagaataccataaaaatgattatcttcatcaaggacagcaatataaggcaagtccttaatgttgaaaaataccttgaagaatggtgaattgaccttaattgtcttagtggcattcttaagtaagtaagttactggtagattcatatcgccaccttgtgacttatgacggtagatatgcatcttataaatgttaccacggaaaatagtaccagtatcgtcaacgattggcacacatctgtagcctgaatcttctaaaacttttaaagcttctgctaatgtggctttttcattaactgttgttaaataatcttttttaataactaaagatttaataagcatgagttcgcctccgaaagtgagaaatgtttcaagtaattatagcatagttgatgagttaattaaatattaattaaagttcatctgaagtaacaactatattttaacaatagttagacaaataaaaaagcatctccgaaaaaagagatgcttttaagtgaaacaagttttagattattgacgaaccttaacgccagtttccttaaatgccttgtccataaccttcttcaattgatctgcagaagcagtcatcaattcttgttccttgtcacttaatggcatttcaatgatttgttcaagacccttacggccaacaactgcaggagtaccaatgtgaatgtcatgtaagccatattgaccgtccataggaactgaaagtggaagtacacggtgttcatcgttcaagatagccttagcgatcattgctgaagcagtaccgattccgtagaaagtagcacccttcttgttaattatttcgtaagccatgttagcaacttccttgtggatgtcttcaagcttagattcatccataccgtgagccttaacccagtcactaacctttacgccaccaacattgttgtagctccatgctgggaattcagtatcaccgtgttcaccaagcatgtaagcattaactgaacgtgggtcaacatgttccatttcaccgataaccttttgaagacgaccagtatcaagtgaagtacctgaaccgataacacgatccttagggaaacctgacattttccaagttgcgtgggttaaaatatcaactgggttagcaacaactaagaaaataccttcaaagcctgattcaacaactggttcaacgattgatgataaaatcttcaagttcttgttaacaaggtcaagacgagtttcgcctggcttttgtggagcaccagcagtgataactactaagtctgcatccttacagtcagggtagtcagctgcatagatattctttggtgaagtccaaggggtagcatcagctaagtcaattgcgtcaccttcaacgtgttccttagcgatatcaataatacccaattcttcggcgataccttgttgtaccattgagaatgcgaaggttgaacctacagcaccatcaccaacaagaataactttacgaggtctttcatctcttggcataaataaaaatctccttttttattagtgatatttttaacaaaatgaattataccatgatagcaagcattaataaaattattatttcctaattgtgctattatatgtaagattgtgtgcatagtgaggagtaaaaataatgaagataattgcaggtttaggtaatccaggacaaaaatatgataaaacaaagcataatactggtttcatgacaatggatcattatttgaatgaaaagggtttgtcactggataaagataaatttgaaggtcattggactaagcaaaaaataaatggtgaagatgtaattttgcttgagccgcaaacctttatgaatgaatcaggtcgttcagttagtcaagtggctaacttctttaaggttgatccagcagatgtgctaattattcaagatgatatggatatgccaattggtaaaattagaattagagctaatggcaaatctggtggacataatggaattaaaagcatcattcgagatttagggacggaaaagtttaatcgtttgaagattggtattcgtcatccgaaaaatgcaacggttgtttcatgggttttgacaccatttaatgatgaacaacaaaaattgatggatgatgcatttgcgataagtgtagatattattgacgactttatcagcggacatggtagtcaatatttaatgaataaatataattaaaatgcgtttaacagagattttagataaagatcaagatttaaataattttatttcaaaaacaaaacaagtaaaaaattcactaatcactggcgctaatgccggtgcttttagtctattgctaaaacagataacaactaaattagcagctccacttattttaattgaagaaaacgaaagtaaagcacaaaacttatatggtgaactcagtgccattatggcagatgaaactgtgcaaatttttccagtagatgctacaattgcaacgcaaacggcagttagttcgcctgatgaactgagcagccgaattcaggcacttaattttttgttaagtggtaaggcaggaatagtggtaacaacgccgcaggggctgcaatacaaactgaccaatccaactgattttgcgcaggcaaagcggagttttgagccaggtcaagaatatgaactaaaagaactcaatgaatggttgcttgcttcagggtatcagcgtgattctttggtagcacggccaggcgaattcgccatccgtggtgatattttagatgtttatccactagatcgagaaaatcccgtgcgaatcgaattctttggtgacgaaatagatacaattaaggaattcgatttagctagtcaacggagtcaaaaagagttagacaaagtagaagttgcagcagctcaagatcgagtttttactaaggatgcaattgcggcagcggctaagaaaattgaacaagatatggccagtgcaccagctcccgctaaagctgtcaaggaccactttgcggcagttcttgatgaattaaacgatggcggtttacctaaaaactatgctttcttaattgactatttgcttgaaatttctagtagtttactcgaatatttgcctaaaaatgggcagattttatttgacgatttgcctttaattaatcaagcggttgaaacagttgataagcaaaacgctgcttttattaatgatgaactaaaaactggtgcaatgttgccagggcaaagcttgcggtcagattatacaaagattctgagcaaagataagcaccatcgtatttatttctcattgtttcaacgaagcatgggacgactgcgcttaggccagatgctcaattggtcaacacgtgagccagaacaattctttagtcaaatgccgctgattaagtcagaattagaatcttatcaaaaggcggggcaaaccgtcattttacaggctgataatgaaaaaagagcacagcaaattgatcaaacaatggttgattttggcttaaatttaccaattgttggtgcagacgaaattgttgaacaacggacacaaattgtagttgatggctttgttagtggctttagtttaccaacagttaaattggtatatctaacggagcgtgaactatttaataagcgcccacaacgtaaaaaaagaattaagacactggagaatgcccagcgtttgcgcaattatactgaactgaagccaggggattatgttgttcatgttaaccacgggattggtcggtttgaaggaatcaagactttagaaaataatggtaccaagcgtgactatattacgattacctaccagcatggtgatcagctttttgtaccagcagatcaattaagcttagtacaaaaatacgttggttcagaaggtaagacaccacatattaataagctaggtggtagtgagtgggctaaaaccaagcgtaaggttcaatctaaagttgaagatattgcggatgatttgattgaactttatgccaaacgtgaatcagaaaaaggctttgctttttcacctgatgatgatctacaaaaacaatttgaagatgcctttccttatccagaaacacctgatcaattgcgatcggttaaagaaattaagcaagatatggaaagctcgaagccaatggaccgtcttttagtaggggatgttggttttggaaaaactgaggtagccttacgagcagcttttaaggcaattcaggataataaacaagtagcctttttagtacccaccactattttggcgcaacaacactatgagacgattcaagatcgcttcaaagatttcccagtcaatactgctatgctatctcgttttcaaacgccagttgaatcaaaggaaattattgaaggactaaaaaatggcaagatagatttggttgttgggactcaccgtattttgtctcaagatgtaaaattcaagaatctaggattgttaattgttgacgaggagcagcggtttggcgttaagcacaaggaaaagttaaagcagttgaaggcaaatattgatgttttgacattaacagctacgccaataccgcgaacgcttcatatgtcaatggtaggtgtgcgtgatctctcagtaatggaaacgccacctcaaaacagataccctattcaaacttatgtgatggaacaaattcctagtgtagtaagggatgcatgcttgcgtgaaatgcaacgtgatggacaggtcttttatttacataatcggattagtgatatcgatgaaactgtcgaaaaactgcaggaattgatgccacaggcgcgaattgcagctgcccatggtcgaatgagtcagaatcagttggaagatattctttatcgcttcctgaatcgcgagtttgatatcttggttacgactacgattattgaaacaggaattgatatgcccaatgtcaatacaatgatcattgaagatgctgaccactatggtctaagtcagttgtatcaattgcggggtagaattggccgtagtgctcgtttggcttatgcttacttcttgtataagccaaataaagttttaactgaggttggtgaaaaacggcttgatgcgatccgtgacttcactgaactgggttctggtttcaaaatagcaatgcgtgacttatcaattcgtggtgctggaaatatgctgggtgcacaacagcacggctttattgatagcgttggttatgatttgtactcacaaatgctggctgatgcaattcaagaccgtaaggggaagacaacagtcaaaaagtcaaacgcagaaatcgaccttggacttgaggcttatattccagattcgtatatcggtgatcaagaagaaaaaattgaattttacaaaaagattaaagccgtctcaagtcaggaagaattaggtaaaattgaagatgaattaatcgatcgttttggtgactatccaacggccgtcgagaatttattagctgttgccggtctaaaggttgatgctgacatggctcaagtgctcaatgtggttaaaactgacgataagattaaagtggaatttacgaatgcagcttcacgcgaacttgagggacctaatatttttaaggcattggagcatgtaagcttaaaggctcgcattagtatgaatcaagaaaaaagaatggttgtcttgctattgttgccggataaaatgaagaatcgtgttttattcaatgaactggcaatctttttacaggcagcaagcgacattgtacaaaggtaactgtaggagaaaaatatgaggattgataaatttttaaaagtttcacgattagttaagagaagaaccgtagctaaagaaatggctgatcaaggtagaatcaaagtcaatggtcgagttgtaaaatcaagctacgatgtaaaaattgatgatattattgaagtaggttacggcgccaaaaccatcaaggctaaggtgttaaatattcgcgagaccacgaaaaaagcagaagcaagtgaactgtacgagctagttgattaatgacttttgattaaatcgttgttatacttgacttagtatagttatttagtaattaggggattaaacaatgaatcatggtccacgtatatataattcgttgagtccagaagagcagagggcgcgtcttagacgtaaacaggctaaattagagaaagaaacacaccgcaagcggttgaacgtaattatggcagtttttgctatcattttcgttgctttaggtgtacagattgcaatcaagatttctcaaactggacgactgaataatcaagtacaagctgaaaaacagactttaactaaagtaaaaaataagagaaatgacttagaaactgaaaagcaggatttgaaggatccaaattatgttgctaagctgattcgttataaattctattattctaaatcaaatgagaagatttataacgtgcatgaaagaaatgatgataactaatggaaaagtatcaagctggtaatcgggtgactggtgtaattaataacattactgacttgggcatctttgttactttacctaatcggcattctggtttggttcatcatagtgactttggcaataattggctacgcgaacgtcgtcgttatcatgctggcgatgaagtgcgcgtggttgtggtgcacatccataaagggagatttaatttatcgatcactcgagtgaatgatccggaattagttgaccatgataatcaattttctaagacaaagccagctgattttgatcaagtcctgaatcaaacaacgcgggatgctaaagaagaaattgaaaagctaaagcaagtattaactgagaattaagagatggtccgaaagggccattttttgttagaaaaataatgaaaattaatgatttttttgaacaacatcagattgacttaaaggataaaagactattagtagccgcaagtgcgggaccggattccatggctttactagatatgctagttaatttgcaaaaacaactaagttttactgtttttgcggcacattttgatcatcaattgcgtgcggatagctcatatgaagtagaagttttgcaaaattattgtgctcaaaagaagatttgcctgtttaatggcaagtgggataaacatgatcagccccaaacgggaattgaggcagcggcgcgagaggcacgatatcattttttgactaatgttgctcatagcgagcgaatgaactatttattaactgcgcatcatggtgatgatttgctagaaaatattttgctcaaatttattcgctcgggaaatcctgaagagatgaatagtttgcaagatatcggctctatgcatggcgttgttttgcttagaccactattagcctatagtaagcaagaattactcgaatatgatcaagagcgtgaaattgactatgtaatagattcaactaatacggaggatgagactgttcgaaatcgactgcgtcatcatgtggtgccattattaaaagaggagaatcctaatttaattagtaatgcactgcgttttagtgaaaaaatgagtcaattgacggatttggcggatgagcagttgaatagtatgagaacggttgagccatttttgggtgcttggcgaattaaaacggacaacttaaatgatttatctacagaagaaaaaaatattttttggcaaaagataatctggcaaaaatatcatcgccgggtaaatgaaaatttgggcaattttgaggtgattgattatcaaggttatagttatttagttgaaaataagccacagaaaattgtgcagccatttagtatcgaactaaatcagcaatttgaattcaacggagcttattatttactaactactgataggcaagctgatttgaaagaaataggaagcttttggctggaaagggatgcacattttactgcgggaagtctagtacctgctagcaaattattgttgaaaaatggtcaacgagttaaggcgaaaaagaaattttcagaaaaggcaattccctttgccttgcgctcttgctgcattacaatttatgctgaaaatgaacctgtttttgtagaaaaatgttatcaaaaacaggactttatcacagatggtaaacattatttcctatacatttattaagaagtcttcaaaataggtgaaaatgttagtggttgcaagctaatttgtgatagaattttaaacgtataacttaaagactttgcggaggttttttatgaagaataaccggaatcggctactttcaaacggccttttctatatagttgtgttccttctgctcctatggggaatcaactgggcactcggcggctctaacaatagtggtagctcagagaatatcagttactcacaatttgttaaagatttgcgtcaaggcaaagttaaaaactttagtgttcaacctgctaatggtgtttacactgtttcaggtagttacaagactgcacaaacaacaaagaatcaatcaaataatagttttgatttctttagtaataattcaagtagaaaagtttcgcgcttctctactaccatgttacagaatgattctaccgtttctaacgtgcaaaacttggcacaaaaaagtaatgctcggatgacaactcaaggagaatcacaatctggcaattggatttcgaccattgtcatgcttgtgccaaccgttttgtttatcgtcatgctttggatgatgatgaaccaaggtggcgctggacgtggtggtggcggcggaataatgaatttcggtcgttcacacgtcaagccagaagatccttctaagaataaggttcgtttctctgacgtagccggtgaagaagaagaaaaacaagaattagtcgaagtagttgaatttttgaaagatccatctaagtacactaagttgggtgcaagaatcccatctggtgttttacttgagggtcctcccggtactggtaagactttacttgctcgtgctgtagctggtgaagctaacgtgccattttattcaatctcaggttcagacttcgttgaaatgtttgtcggtgttggtgctagtcgtgtacgtgacctgtttaacaatgccaagaaaaatgcaccaagtattatctttatcgatgaaattgatgccattggtcgtcgtcgtggcaatggcaccggcggtggtaatgatgaacgtgaacagactttgaaccaattattggttgaaatggatggttttgaaggcgatgaaggtgttattgtcattgctgctactaaccgttcagacgtcttagacccagctttgcttcgtcctggtcgttttgaccgtaaggtattggtaggtcgtcctgacgttcgtggtcgtgaagctattttaaaggttcacgctaagaacaagccgcttgcacctgatgttgatttgaaggaagttgcccgtcaaactcctggctttgtaggtgcagatttggctaacgtcttgaatgaagccgcattagttgctgctcgtcgtaatggtactgagattactgcatcagatattgatgaagccgaagaccgtgtgattgccggtccagctaagaaggatcgtttgatttctgaaaaagaaagaagacgtgttgctttccacgaagctggtcactcaatctgtggtttggtcttaagcgactcacgtactgtacgtaaagttactatcgtacctcgtggccgtgctggtggttataacatcatgttgcctaaagatgatcaattcattttgactaaaaagcaattatttgaacaaattgttggtttgatgggtggtcgtgcaggtgaagaagcaaccattggtgataagtcaactggtgcttctaacgactttgaacaagctactcaaattgcgcatagcatggtagttaactatggtatgaccgaatccttaggtatggttgagcttgaaaaggaaggcgaaagcaatccttacggctttaagccatatagtgaagcaacttcagctaaaattgatgaagctgtaaagaagattttggatgaagctcatgctaaggcccttgagatcgttaaggacaacaaagaaaagcatagaatcattgccgaagctttgctcaagtatgaaaccttgaatgaaaagcaaattatggccttgtataagactggtaagatgcctgaaaaagacgaagatgaatatccgagtgaatcaaaggcttcaacttatgaagaagctaaggctgctgcagagaagcgcgaagttgaaaaggcagaaaaaaaggattcagatcaagcattagctgatcaagaaaaagataccttggagactccatctgaaaagaatcatgaagttgaagaaaataatcctgagaatcccgaaaaggatcaatcagaaaatgaaacttcaactcaagatactcctgcagatgatgagcataaagacaattaaataaaagtagggcctgtcacaggctctatttttttagaaaagaaggataaaaatgagtgattatttagtaaagtcaattgataagactaaaaacttacgcttgttaaccattaccgctaagggtgtagtgagtgaagcacaaaagcggcatgacttgtggtcagcttcagctgctgtgcttggtcgtactttagtaggatctcttttacttgctggtgcagaattgacagataaggaagaattgacagtccgtttattaggcaatggccctgttggtccaaccatcgtgacagctacctccgatttgaaggtaaagggttatgttaagaatccacatattgctttaccacctaagaaaaatggtcatattgatgtgaaaaaagctgttggacaaggatggtttgaagtaactaaggaccttggcttgaaggaaccatacacaggtcaggtaccaattgtttctggtgaaattgctgaagattttgcttactatttgactaagtcagaacaaattccgtcagctgttggtttgtcagtatttgttaatccaaataattcaatcggtgaagctggtggctttatgttgcaagcacttcctggtgctagtgatgctttgatcgatgaaacgattaagcgaattgatgcattgccagcactctcaacttcatttttggatggaatgacaccagaagacttagcacgtaaaatcttaggaaccgattgtaagattcttgaaaaagatgatgtagcctttaactgtgattgttctaaagaaaagtatgctggtattttggaaactttgaagagcgatcaattgaaagcaatgattaatgaagatcatggtgccgaacttacttgcaatttctgcggtaacaagtatcattattcagaagatgaattgaaagatattttagctaaaaagaacaaagataaagattattaaggcaaataaagccctaaggttttaacccaatgtcattaagttaagacattgacaattaatattagacttttaaagcactgatttaacatttaattggttaaattggtgcttttttcgtacaacaaataaggcatagcacagattctgcttttttaagctacgcgatataaataatatacagctgatttgggcttaatatttctcttgtccttgcggcctggtctaattggaatggtataatagctgatctgaataaggatccgttcaaaatcttgcgttaaagaagaagccaaatacatgctctgaataatcaagcatgattgcttgaaattgatggcatattgatacttgcaatgcttttgcggaatataggcctgtgcatcaatttgactgattgcattaaacataatcatatgggcataaatttccatttcaataaatttatcttgtttggaatggaactgtacactgcctaaagaatacttcaatttcttgaaggaggtctcaataccccaacgcagatgataaagctctttaattctttttagcggataattttttcgatcaagattggttagcacaacttcccattcttctttgcctgatttggcatcattaattctaaatttgcaggctcgaaattttattgtgcataactcgccaaaatcccagcttagatcctgggtatttttagagcgatacttaatatattggcgataatgatgctggacatggtgaatattctcactggctttatgcgtgatgtagtaatagttagaagtagttaccaggcaggaaatctcacgatcacattcttgatcaggcaatgtcgttatttctttaactccgccttgtccagccttagttcgtattatgtaatgacagttaggcaggcgattgcagttttcaatcatattgaaactagtgtagccacgatccattgttacaatatatggaccacaattcaaagctttaagcatttgaacagccgctttgcgttcatccatttctgatttaggctgaaaaatacaatcctggtaggtattattcaatagatcatataaggcattaacgtgaatttgacaatagggtttctttttatgagaagaagcttgtacaatgttattcgatttcggattccagatttgattaaagtcagagccatcaatggcaaacaaacggtagtgatgatcaaaaagttgaatattaaatagattttgattaaaaacagtcagaatatgtttaaaacaagcaggagaaagctggcttttgcgttgaacataggcagaagtactaactactttatcgttctttttagttgcatcttcgccaaaagctctaaagagttcactgtttaaattctgaccttgcatgttaattgtagttttaaggactgtcgctgcatctaaagtgcgtttcctggtaaaagcatgaggattattaataaaatcgtgaatatgatccccagtattattgataatttgatcaagacgttctagaatattcttatgaagggctttcataattaacaccatctttctggcaataattttgaaggtttaaaatatataatatataagataggcgaaaaggctggtcttttcgcctttattttatacaaaaaaagagatcgaatccaaatgattcgatctctaaaaaagcacccttaattgtcaatgtcttaacttaatgacattggttttaaccagcggggcttttttgatatcataatagggtaattttgaaaggatgatttggtgaataacagctggaaaattcgcgatatcaccattccaaaccgagttgttgttgcgccgatggcgggagtttcaaactctgcattccgcgttgtctgtaaggaattcggagcggggctggttgtctgcgaaatgatttctgatcatgggatcatttatggaaataaaaagacattaagtatgatggatgttgatccgcgtgaacacccaatgagcattcaaatctttggcggaagcgaggaaactttgcttcaagctgctcaatatattgatcaacataccgatgcggatattattgatattaatatgggttgtcctgtacctaaagtaacaaagactgatgcaggttcgaagtggctacttgattcaaacaagatttatcagatggttcacgcagtagtgcagaacgttaaaaagccggtttctgttaaaatgagaacaggctgggataaaaagcatatttttgctgtagaaaatgctttagctgctcaagaagcaggcgcaagcatgattgcgatgcatggtagaacacgtaaacaaatgtatcaaggtgaagctgactgggaagtattacatgatgttgcccaggtgctagatgtgccttttgtggctaatggtgatattagaacacccgaattagctaaaaaagcattggatgagatcggttgtactgcagtaatggttggtcgcgctgctttaggtaacccttggattttgaaagatatggtacactatctggaaactggtgaaaaattgaagccgcaaactgttcgtgagaaggttgaaacggctaaacatcagcttcacgcacttgttaaaattcacggtgaaaagcgtgctgtaccagaatttcgtcagcaagccgcgtattatttaaagggaattccccgttcagcccgtactcgtgctaaaataaatgaggtctggacgcgtcaagaagtatatgatttgcttgataattttgttgacgagtatgaaaaaagagaagaagctcgtgctgcacgacgcgcgacaatgaacaaataaatggaggaaaagtaaattggcaaagaatgaaatgaatgaccaattaatagttcgtcgccagaagatggaagaattacgtgaaaacggaattgaaccatttggtcaaagaaaatttgatcgtcaagatttggcaagtactttagaagaaaagtatggcaacgaagataaagaagaattaaacgctgatatgcctaagaccaagattgcaggtcgtatgcttgcaaagcgtggtaagggtaaggttggttttgctgatctttacgaccgtactggtaagattcaaatctatgtacgtaaggatattgttggcgaagataactacaagatctttaagaaatctgatattggtgatttcttaggtattgagggtgaagttatgaagactgatactggagagcttactattagagcccttcacgtaactttcttatcaaaggctcttcgtccattaccagataagtaccatggtttaaaggacgttgaggcaatttatcgtcaacgttaccttgatttgattaccaaccatgatagttacatgcgttttgttcaccgtacccaaatcattcaagctattcgtgactacttaaatagtcaaaacttcttggaggttgaaactccagtacttcacaacattcctggtggtgctgaagctcgtccatttattactcaccacaacgctttggatattaacctttacatgagaattgctttggaacttccacttaagcgtttgattgttggtgatatggaacgtgtttacgaaatcggccgtgtattcagaaacgaaggtttggacactcaccacaacccagaatttactgaacttgaaagttacgcagcatactgggactaccatgatgttatggatgaagctgaaggtattatccgtgctgcagctaaggttgtttcagatgacggtaagatcacttaccaaggtactgacattgacttaggcaagccattccgtcgcgttcacatggttgacttgatcaaggaaaagactggcgttgacttctggaagccaatgactcttgaagaagcaactaagattgcggaagaccacgacatccacgttgaaaagttctggaaagttggtcacattattaacgccttctttgaaaagtactgtgaagaaactattgttgacccaaccttcgtttacggtcacccagtagaaatctcaccacttgctaagaagaatgctgacgatccaagatttactgatcgtttcgaaatttacatcatgggtgaagaatacggtaacgccttctcagaattgaacgatcctgacgaccaacgtgaacgtttcgaagctcaaatggaagaacgtgaagcaggtaacgacgaagctgacatgatcgatgaagattaccttcgtgctatggaatacggtatgccacctacaggtggtttgggtatcggtattgaccgtttggtaatgcttttgactgatgctccagctattcgtgatgttcttttgttcccaacaatgcgtccagaacgtgttgaaagcgtagaagctgaagttaaggctgatatggaaaagaagaataaagaaaataagtaatcttataaattaaaaaactcttatctatgttttaagcatggataagagtttgtgtttatatattttttaattgagaatcattttttcatcagagtattttttaggatcatttaaatcccattgctgatatctaacttcttgacacttaaagcctaattttttgtaaagctttttggccttagtattttctgcaaatacatcaagactaactggtcgactcatgtatctcaaagctgtcgttgctaaagcatacccgatacctttattttgatgaattggatctacataaatgtaatccagttcttggggatgaactgcaacgaagcccaatatgctgtcagcatcataagctacataaattttgcaggagaaaaaatcatccttatatggagctgtctctaaaggtatgaagtatttttccgcaccaccaattgttagctcttctttacgactaacgtcgtgaatgcgacatacttcagcataatcgtttggttgatattctctgatattaaattttggcatgtttttctcgcttcctaatattaagattttgatttagaaagcaatagtacgtaatctcatgtgaaatctcctttaattaaattgaagatattatagcaatttttttaattcggtacaataactaaaattaacttagttaaaaacagataagtaatattttttcaaaaagtatttgcaaagagaataatctttgctataataatttttgtatcgcggaagtagttcagtggtagaacatcaccttgccatggtgggggtcgcgggttcgaatcccgtcttccgctccaagatgaagagctcacgaatgtgagctttttttgtgcctaaaataaatttatcttttttgataaaaaggtcttgcaaagaaaaatgtatttgctataataatatctgttgtcgcggaagtagttcagtggtagaacatcaccttgccatggtgggggtcgcgggttcgaatcccgtcttccgctccaagatgaagagctcacgaatgtgagcttttttgtgcctaaaataaatttatcttttttgataaaaaggtcttgcaaagaaaaatgtatttgctataataatatctgttgttgcggaagtagttcagtggtagaacatcaccttgccatggtgggggtcgcgggttcgaatcccgtcttccgctccaagatagaaggctcaccaagtggtgagtctttttttacgggaaatagctcagtttggtagagcgctacgttcgggacgtagaggtcgccggttcaagtccgattttcccgatatacaagctatccgtttgggtagcttttttctttttgttataatatcttttaaaacttaaagggagattaaaaatgacggcaactactgaagaaaaatacaaattattagtggagcaagctagagctttgattgagggagaagatgattggattgctaatacagctaatttatctgctcttttgtttaattcgttaaatgatgtgaattttgcaggtgtttatcgctatgaaaatgatgaactgatattaggtccatttcaggggatgccagcatgtgttcatattcaaatgggaaaaggtgtttgtggtacggctgcacaagcaaaaacaacgcagattgttaaggatgtacatgaatttgctggtcacattgcttgtgatagtgcttcaaattcggaaatcgttgtcccaatttttaatcagggaaaactttggggcgtctttgattttgattcgaccaagctactaagcgtataattttttacggtaagttgaataaataattaaaaaagcccaagtcctttgaatttggacttgagctcaaacaaaaagaccagtagtctgatgttaagaacaaaaaacacattagaagctggtcttttatgaattcaattgtaactgaaatcgcaaatattataaagtctgaagataattatattaagcgtgaaagaaaaataatctgtttcttcttaaacctgattaaggaaatcatggccttggctttagctaaagttgatgatgaaatgattaccaaggttaaagcacagggctatcagattgataagaagaatgagcgctcaatcaatatggcttttggcgaagttaggtatgtcagaagaagatatgtctgcccaggcaaacaagcaaggtatcccttggatgaattaatgggctttgacaaatacaagcgctacagtattttagcagtcaaaaacatcttagaagtaagcagcgttgccacttatcgcaatactgctctagcagtcaattgcctgtctggctttaatattagccatatgcaggtgggcaatttggtaaaaatggccgggaaaaatattaaagcgggccaagaagcagattcaagatatgatgccgcaggcactaagaaaaaggtcccagttttgtatcttgaaggcgatggcgtggtgatcaaaggcactaaaagccggttggaatttcatcgctatcaggtctgtgaaggcattgtcaatataagcaagaaacgcagaaagcgaatcaatgccaaggaatttgtttctttaagccgacttgatgcgctgaacgaagccaaggagtacctggccaatacttatgatctttctgatactgtaattcttagcaacgccgatggcggtgctggatatgccaaaacagacttcgatgacattgtagggctatgcaagcgtcatgagcatttcttggatgtctttcacctaaataagaaaatcaaagaaaggctatattttgcgcctgacctgcaaggcaagctgatttctgctttggaatacaaatacagctatgacaaagttaaaactatcctaaccactgcagaaagccgactaattgatgaattgaataccgagctcaatcatgattatctggggcgcctaaggaattatattgatcgtcattgggacgatattaagccgtttaagaaacgaaaactgactgtgactaaagccattggctgctgcgagagcaaccaccgcaagtatacctaccgtgttaaggggcaaggcaagaaatggtcaaaatctggagcagaaggcatgcttaggatcttaagctgcatcaagaatcgagagctggaattttggcttagcagcgagtttgaagattcagaaataactgtattgactgaacaggaattaaaagcagcggcccgtgacagcttaaagaagcgtcatgaagttcatttaggcatccagcatggcgcattaaccgcacaggtagctggcaatagttatttaagcaagctaagcagaaatttaagtcatataaatatttaagaaattaaggttagactaatggtttaaaggctaccgcaaaaacattgacacttacaccaagctagctaattttgacgaaattgataaaaagtatttaactgaaatagcgaaagcaatttttgcgtaattattagaattggacataatgaagttgaagataagtcaaattgttttacttactgacaaaagaaaagtaaaataccataacgtattttaaagggtggtgtttgtatggaaaattcatatagtaagagcgttaatcaagtattgaaaattgcacgtgaacaagcacaaaattttcatcatcgcttgattggcacagaacatgttttattggctctagtaattgaaactgacggtgaagcaggaaaaatcttgcgttcatggggattaacaccaactgcagtacgtgaagaaattgaacgttatacaggttatggctctgcccctaaggcaagctacatggaaatgtcaccacgtttgagtttagctttggattatgctagaagacgagctaatgacgatggagttaaggaagttaacactaatcatgttttgctgggaattactgcaagtgagcaggttttatcagcaatgattttgaaaaacttgaatgttgatattcctcgtctgcagcaggatgttgaagacagtttgagtcaagaccaagactttggtgattcagctaattggctgggtgatgataacacgacgactggtcaaaagaagcgcaagagcactactcctaacttagataaggtagcggttaatttaaatcaacgtgtgcgtaatggcgagattgatccggtgattggccgtgaccaagaaattaagcgtgtgattcaaattttgtctcgacggactaagaataatcctgtcttagttggtgaaccaggagttggtaagactgctgttgctgaagcgattgcaactgagattgtcaacaaaaaagtgccacaggatatgcttaagaaacgggtaatggccttaaatttaggtagtttagttgctgggactaagtatcgtggtgagtttgaagacagaatgaagaaaatcctgaacgaagtcaccaaggatggcaatgtcattctctttgttgatgaaatgcatactttaattggtgctggtggtgctgaaggtgcaattgatgcttctaatatcttgaagccttcgcttgctcgtggcgatattcaaatgattggtgcaactacttttaatgaatatcaaaagtacattgaaaaagatcaagctttggcacgtcgttttcaacaagtgcgcttaagtgagccttcaagagatgacactttgacaattatgcgtggcttgaagtcgaaatatgaaaagttccatcatgtgactatttctgatgagagcttgaaggatgcagttgatttgtcaacgcgctatatttcggatcgctttttgccagataaggcgattgacttagtagatgaagctagtgccgcagttaagattcgtaataacattagcaatgatgctgagctagaaaaagttaatgagcaaattaagaaactgattacgcaaaagaatatggctgccgctagtcaaaactttgttaaagctgctcaattgcaggatgagcagaacaacttagaaatgcaacgtgaagcaatggtagagaagttagaagacaaagttagtgctaaagctgtggttgagccagaagatatcgctaaagtagtttccaactggactggcgtccctgttacccagatggaacgcaatgaatcacggcagctagctaacctggaaaagattttacaccaacgtgttattgggcaagataaggctgtttcagcagttgcccgtgctattcgtcgtagtagaagcgggattaaagatgaacgtcgtccgattggttccttcttgttcctaggtccaactggtgttggtaagacagaactagctaagtcagttgcagcagcaatgtttggctcggaagacaatttgattaggctagatatgtctgaatatatggaccaaattgcttcaagcaaattaattggctcggcaccaggctatgtcggttatgaagaaggcggtcaattatctgaaaaggttcgtcgtcatccgtactcggttattttgcttgacgaagtagaaaaagctcatccagatgtctttaacttgcttttgcaggttttagatgaaggatttttgactgactccaaaggtagaaaagtcgactttagaaatacaattataatcatgacttctaatttaggttctcgttcgctctttgataataaggcagtcggcttcaatgcagataatgcagatccagccaaggcgagatcagctaaagttgaacaagcaatcaaacaattcttccgcccagaatttttaaacagaatcgatgaaactattatcttcgatgaactagataagaagcagctgcgcaatattgtaactttgttaacgcacaagctggtagttcgtttgcaaaagaagggtatcgaattgaagctatcacgggcagcactggatcagattgcacaagatggttatgatccagaaaatggtgctcgaccattgagaagagcaattcaaaatgatattgaagacaagattgccgagatgctgattgtaggcgaagttaagtcaggcgacactttgaaaattggtagtcagcatggacatttaaaatttgaagtagttaatccgaaaaaagaaactgtaaaagtcaagtgatattggtgctataccttgacaaaatgctgaaaatatcatataatttttgctgatttaaaaagactgagattcaggattttgctgatctattgtccagcaaaatgataagggacaaaaacgacaattgttgtttttgtcttttttatgcctaaaattgcagttttttgaatttgtaacagaaatgtaatatttgctttcttagacagaaaggatgtttttccttgttaaatggacacgtagtgaactacggtaaacatcgaactagacgtagcttctcccgcattaaggaagtattgaagttacctaacttaactgatgttcaaaccgaatcatataagtggtttcttgataaaggcattaaagaagtctttgatgacattatgccgattagcgatttctcaggtaagctttcattagaatatgttggctataaattgcaaaagccaaagtatacagttgatgaagcccgtaaccatgatgcaacttatgctgcaccaatgcacgttaccttgaaattgactaaccaagaaactggtgaaattaagactcaagatgttttctttggtgatttgccattaatgaccgaatcaggttcatttattgttaacggtgctgaaagagttatcgtttcacaattggtaagatcacctggtgtatattacactggcgattatgacaagaatggtcgtcaaatctttggtactactgttattcctaaccgtggtgcttggcttgaatatgaaaccgacgcaaagaacgtttcatttgttcgtgtagaccgtactcgtaaattgcctcttactgtattgattagagcaatgggtattggctctgacagtgacattattgatatgtttggtcaaagtgatactttgcaattcactttggacaaggatgttcataagaacccagctgactcacgtgtagctgaagccttaaaggatatctatgaaagacttcgtccaggtgaaccaaagactactgattcttcacgttcacttttgtatgcccgtttctttgatccacgtcgttacgatttagcacctgtaggtcgttacaagatcaataagaagctttcacttaagaaccgtttatacggtcaaactttagctgaaactttagctgatccagatactggggaaattgttgctaagaagggtactgtagttacccacgaagtaatggataagttagctccataccttgatcgtgatgactttaagatggtaacttaccaaccttcaaaggaaggcgtattaccagatcctattacagttcaagaaattaaggtttactcaaaggtagaccctgaacgtgaagttaaattaatgtcaaatggtcatattgctgataacgttaagcatttgactccagctgatgttttagcttcaatcaattacttctttgcattgcaagatgaaattggtactactgatgatatcgaccacttgggtaaccgtcgtattcgtcgtgttggtgaacttcttcaaaaccaatttagaattggtttggcacgtatggaacgtgttgttcgtgaaagaatgtcaatccaagatccttcaacagttactccacaacaattgatcaacattcgcccaattgttgcaagtattaaggaattctttggttcatcacaactttcacagtttatggatcaacataacccattaggtgaattgactcataaacgtcgtatgtcagccttagggcctggtggtttgacccgtgaccgtgctggttatgaagttcgtgacgttcactatactcactatggtcgtttgtgtcctatcgaaactccagaaggtcctaacattgggttgatcaactcacttgcttcatatgcgattattaataagtatggttttatcgaaaccccataccgtcgtgtttcttggaaggaccacaaggttactgataagatcgactatttgactgctgacgaagaagataattacattatcgctggtgccaacactccattgaatgatgatggttcatttaaggagaagttgatcttggctcgtcaaaaggaagataacgtcgaagtttctccagataagattgactacatggacgttattcctaagcaagttgtttctgtcgcttcagcatgtattccattccttgaaaacgatgactctaaccgtgctttgatgggtgccaaccagcaacgtcaggctgcaccattaattaatccgcatggttcacttgttggtactggtatggaataccgtgctgcacacgattcaggtgctgctttaatcgctaaggctgctggtgtagttgaatacgttgatgctaatgaaatccgtattagacgtgaagatggtactttggacaaatacacacttgaaaagtaccgtcgttcaaataactctaagtcatacaaccaaactcctaatgttaaattaggtgatcaggttgacaagagtgatgtaattgctaacggtccaactatggatcatggcgaacttgctttaggtcaaaacccattgattgccttcatgacttggaacatgtacaactatgaagatgccatcatgctttctgaacgattagttaaggatgatgtttatacttcaatcagtattgaagattatgaatcagaagctcgtgacactaagttaggtccagaagaaattactagagaacttcctaatattggtgaggatgctttgaaggatcttgatgctgatggtatcgttcgtgttggtgcagaagtccacgatggcgacattttggtaggtaaggtaactcctaagggtgtaactgaattatctgctgaagaaagattacttcacgctattttcggtgaaaaagctcgtgaagttcgtgatacttcacttcgtgtaccacacggtggtggcggtattgttcaagacgttaaggtttatactcgtgaagccggcgatgaactttcaccaggtgttaacacaatggttcgtgtttacatcgctcaaaagagaaagattcaagttggggacaagatgtctggtcgtcacggtaacaagggtactgttgctgcagttgttccagaagaagacatgccatacttaccagatggtactccagtagatatttgtttaaacccaatgggtgttccatcacgtatgaacatcggacagcttcttgaattgcacttaggtgcagctgctcgtcaattgggcattcacgttgcaacaccagtatttgatggtgctgacgaaaatgacgtttgggacacagttcgtcaagcaggtgttgataaagatggtaagaccgttgtttatgatggtcgtaccggtgaaccattccacaaccgtgtatctgtaggtgttatgcactacttgaagttgacccacatggttgacgacaagatccacgcacgttcaattgggccttactcattggttactcaacaaccacttggtggtaaagcacaatttggtggtcagcgttttggtgaaatggaagtttgggcccttgaagcttatggtgctgcttacacattgcaagagattttgacttacaagtcagatgacgttgttggtcgtgtaaaggcatatgaagctattgttaagggtgaaaagattcctaagccaggtgttccagaatcattccgtgttcttgttaaggaacttcaatcattaggtttggatatccgtgttcttgatatgaaccataatgaaattgaacttcgtgatatggatgaagactcaagtgaacacttgaacatcgatactttgtcacggatggcagaagagcaagaaaagaagaagttagccgaagaaactggaaaatcagaagataaagacagtaaagaaaatgcagataagccggtagctcctgcagatgagtctgacgataaagtttctaaatagtaggaggttaaacttttgatcgacgtaaataagtttgaaagtatgcaaattggtcttgcatcacctaacaagatcagaagctggtcatatggtgaagttaaaaagccagagaccatcaactaccgtactttaaagcctgaaaaagatggcttatttgatgagagaatttttggaccaacaaaagattggtcatgtgcttgtggtaagtacaagggcgttagataccgtggtatcgtttgtgaccgttgtggtgttgaagttacttcttcaaaggtaagaagagaacgtatgggtcatattgaattggctgcacctgtaactcacatttggtactttaagggtatcccatcaagaatgggattagttttggacatttctccaagattacttgaagaagttatttactttgctgcatacattgtaattgatccaggtgatactgaccttgaacctaagcaattattaactgaagctgaataccgtgaacaaaaagctaagtacggtaaccgttttgaagctaagatgggtgctgaagctgttcgcgatttgcttaagaaagttgaccttgataaagaagttaaggatttgaagaaagaacttcaaactgccactggtcaaaaacgtacgcgtgcaattagacggttagatatcttggatgccttcaagaattcaggtaacaagcctgaatggatggtaatggatgccgttccagtaattccaccagatcttcgtccaatggttcaacttgaaggtggccgttttgcaacttcagatttgaacgatttgtacagacgtgtaatcaaccgtaacaaccgtttgaagagattgcttgatttgaacgcacctaatattattgttcaaaacgaaaagcgtatgcttcaagaagctgttgatgctttaattgataacggtcgtcgtggtcgtccagttgttggaccaggtaaccgtccattgaagtcactttcacatatgcttaagggtaagcaaggacgtttccgtcaaaacttgcttggtaagcgtgttgactactctggtcgttcagttatcgatgtttcaccaaaattgaaattctatcaatgtggtgtgccacgtccaatggctttggaattgttcaagccatttgtaatgcatgaattagttaaacgtggaattgcatcaaacatcaagaatgctaagcgtaagattgaccgtgaagatgacgatatctgggatgtacttgaagatgtgattaaggaacgtccagttcttttaaaccgtgcacctactcttcaccgtttgagtattcaagcctttgagccaatcttggtaccaggtaagtcaattagacttcacccattagcttgtgaagcctacaatgccgacttcgatggtgaccagatggctattcacgtaccactttctgatgaagctgttgctgaatcaagattgttaatgttggctgctcaccacattttggctcctaaggatggtaagccaattgttactccatcacaggatatcgttttgggtaactactggttaactcaggccgaacgcggtcgtgaaggtgaaggtatgatcttcagctcaccagcagaagctgctgtagcttacgaaaatggcgatattcactaccataccattattggtatgtctgcagatgctatgcctaaaaagccatggcctaagggacatgaacacggcatctttattaccacttatggtaagattgtcttcaatcaattgttcccagatgattacttctatatcaatgaaccaactgaagagaacttgaacaatccgttggatgctaagtacttcttaggtgaaggcgaagagattgataagaagatcgatgaagtaggcgatgatttaatcgctagtccatttaagggaagcttcttgtcagattctattgctactatttacaagtattacaaggttcaaagaacttcagaatacttggatgatttgaagaagttaggctacattagctcaactacttcaggtattactattggtatgactgacgttccagaaatccaagataaggatgaaaaggtagccaaggcacgtaaacaagttgatgttgtttctaagcaatttagacgtggtttgattactgaacaagaacgtcacgaccgagtaattagtatttggaatgcatgtaaggacaagatccaaaacgaaattgcacaaattcacgcacctcgtaatccaatttcaatcatggcagactcaggtgcccgtggtaacatttctaactttactcagttagccggtatgcgtggtttgatggccactcctaacggtggtttgttcgaaattcctgttacttcaaactttaaggaaggtttgtcagtattggaattgttcatgtctactcacggtgctcgtaagggtatgactgatactgcattgaagactgctcagtcaggttacttgactcgtcgtttggttgatgttgctcaggacgttattattcgtgatgacgattgtggtactgatcgtggtattacagttagtgccatcatggaaggtgacgaaatgatcgaaccattatttgaccgtttggttggtcgtttcactgctgagactgttaaagatcctgaaactggcgaaactattgtcggcagagatgtcatgatggatgaaaacatggcacacaagatttgtgatgcaggtgtaactcacgttaagattcgttcaattcttacctgtgatactcctcacggcgtatgtcgcaagtgttacggtatgaaccttgctactggtgaagaagttgaagttggtgaagcagttggtactgttgctgctcaatcaattggtgaaccaggtactcagcttactttgagaactttccacaacggtggtgttgccggtgctgaagatatcactcaaggtttgcctcgtgtgcaagaattgtttgaagcacgtaaccctaagggtcgtgcaaccatttctgaagttgatggtgtaattgattcaattcaagaaaacccagcagaacatactcgtgaaattactgttaagggtaagattgatactagaagctacagtgttccttatacagcttcagttgctgttagcgaaggtgactacgttcatcgtggtgacaagttaactcttggttctgttgatcctaaggaattgattcaagttactgatacattaactactgaaaagtacatcttagctgaagttcaaaaggcttatagaatgcagggtgtagacattgccgacaagcacgttgaagtgttaactcgtcaaatgctgcaaaaggttcgtgtccttgatccaggtgaaactgacatcttgccaggtgaagttatggatattggtcaatttagagaccgcaacaaggaagttattatttctggtggtattccagcaactgctcaaagcgttatcttgggtattactaaggctgctttggaaactaacagtttcttgtcagctgcttcattccaggaaaccacacgtgttcttactgatgcatctattagaggtaagaatgatccacttcttggacttaaggaaaacgttattattggtaaaattattccagctggtactggtatgcctgtataccgcagcatggaacctgaagctgacgttaagaagccagattcagtatactcaattgctgatattgaaaagcaaatgaaagaaaaggataaagctaagcaagactaagctttattgaaaataaataagcatttccaatcttttaagagcgggaatgcttatttttttgtctaaaaaattaattgggttagtactaatcctaggaaaatatatggaataaatggatagcgatggttaataggagttttttcaataagaaaaattgcaattaccaagattgaagcaaatagaaaaactaaattggcaaatgatggggtgaagtagcaagcgataattaagtaaattaataaatcgcctagccccatttttctttgcattatgctatagctaaaaattcctagcaataatgtaaaagagatccagtcgattaatgtaaaagctgcaaattggttgaataaaatcgcaacgctaatggctggaattagtaggagaagatcaaattcttgcttttgataatcagagattgcaacgactaaaagcgaaaaaagcaaaatagcggtaataatgtcctgtgtcttactaaaatcgagtaaacaaaaggcaaagccgccaattaattcaaataaaaataattcaactggaatttgttgataacaataacgacattttccttgaagaaaaagataagataataatggaatttcatccaaaattgataattcaaggtgacagttgttgcactgagaacgtgagtaaataaaatttttatcattccagtgctcgtaaactactgctgcgtgagaagccaagcaacttccaattataaagttagtaaaaataaataagtatttcaaaaaaacacctccactatttattacgcaaaaatagccgatttttctttttttattttgaaaaagtttgctttctgcttaaaaccgagtacaatagtctttgtatgttttgaacagtctattcgtgagtaaaaaagaaactcccggatgtgtgaacaaaatagtattttaggaggaaaaattaatgccaaccattaatcaattggtaagaaaaggccgtcattcaaaggtcactaagtcaaagtcacctgctttgaattacagctacaacagtatgaagaaggaatcagtattcaacccagctccacaaatgcgtggtgttgcaactcgtgttggtactatgactccaaagaagcctaactcagctttacgtaagtacgctcgtgttcgtctttcaaacttgatcgaagttactgcttacattccaggtgaaggccacaacttgcaagaacactcagttgtattaatccgtggtggtcgtgtaaaggaccttcctggtgtacgttatcacatcgttcgtggtgcccttgatactgctggtgttgatggcagaaagcaaagccgttctaagtacggtactaagaaagattaaaggaggagttaaataatgcctagaaaaggtcacgtaactaagagagacgttttagcagatccagtttacaactcaaagcttgttactaagttgatcaaccacttaatggtcgatggtaagagagctaaggcatcttcaatcctttacgatgctttcaacattgttcaagacaagactggtaaggaaccacttgatgtatttgaagaagctatgaacaacgttatgcccgttttggaagttagagctcgtcgtatcggtggttcaaactaccaaatcccagttgaagtacgtcctgaaagaagaactactttaggtttaagatggcttgtttcatacgctcgtttacgtaacgaacacactatggatgaacgtttagctaacgaaattatcgatgcttcaaacaacactggttcagcagttaagaagcgtgaagatgttcaccgtatggctgaagctaaccgtgcatttgcacactaccgcttctaatttgttcgttttaatttaaggagagaataatttatggctaacaagcgtgaatttccattagcaaagacacgtaacatcggtattatggcccacatcgatgcgggtaagactactactactgaacgtatcctttactacactggtaagatccacaaaattggtgaaactcacgaaggtgattcacaaatggactggatggatgaagaaaaggaacgtggtatcaccattacttctgcagctactactgcacaatggaaagaccacagaattaacatcatcgacaccccaggacacgttgacttcactatcgaagtagaacgttcacttcgtgttcttgatggtgccgtaactgttcttgatgcccaagctggtgttgaaccacaaactgaaaacgtatggcgtcaagctgaaacttacggtgttcctcgtattgttttcgttaacaagatggataagatcggtgctgacttcgataagtcagttaagtcattgcacgaacgtttaaacgctaatgcccatgctgttcaaatgccaattggttcagctgacacttttgaaggtgttatcgacttaatcaacatggttgccgacatctacgacgaagataagcttggttctaagtgggatactgttccagttcctgacgaatacaaggaagaagctgaagcacgtcgtaacgacttaattgaagccgtagccgatgttgatgacggcatcatggaaaaattccttggcggtgaagaaatttctaacgatgaattaaaggcagctatccgtaaagctactttggacttgaagttcttcccagtttacgctggctcagccttcaagaacaagggtgttcaaatgatgcttgacggtgttattgactacttgccatcaccacttgacgttaagccttacgttgctcacaatcctaagactggtgatgaagttgaacttatggctgacgataagaagccatttgcagctcttgcatttaagattgctactgacccattcgtaggtcgtttgactttcatccgtgtttacaccggttctcttgaatcaggttcatacgtattgaacgcttcaaagaattcacgtgaacgtgtaggtcgtttgcttcaaatgcacgctaactcacgtactgaaattccagaagtattctcaggtgacatcgctggtgctatcggtttgaagaacaccactactggtgactcattaactgacccagatcacccacttattttggaaagcttgaaagttccagatccagttatccaagtatcagttgaacctaagtcaaaggctgaccgtgataagatggacgttgctttgcaaaagcttactgaagaagacccaactttccgtgctgaaactaacccagaaactggtcaaaccttgatttcaggtatgggtgaacttcaccttgacatcatggttgaacgtatgagacgtgaatttaacgttgatgctaagattggtgaaccacaagttgcttaccgtgaaaccttcaccaaggaagctaaggcacaaggtaagtttgttcgtcaatcaggtggtaaaggtcaatacggtgacgtttggattgactttactcctaacgaagaaggtaagggttacgaattcgaagatgccatcgttggtggtgttgttcctcgtgaattcattccttcagttgaccaaggtttacaagaagctatgaagaatggtgttcttgcaggttacccattgatcgacgttaaggctaagctttacgatggtagttatcacgaagtcgactcatcagaagctgccttcaaggttgctgcttcacttgctttgaagaatgctgcttcaaaggctggcgcagttatcttggaaccaattatgaaggttcaagtaactactccagaagaatacttaggtgatgttatgggttcaatcactgctcgtcgtggtaccatggaaggtatggaagacagagccggtgctaagatcatcaactcatttgttccactttcagaaatgtttggttacgcaactactttgcgttcatcaactcagggtcgtggtacatttactatggtatttgatcactactcaccaacacctaaatcaattcaagctgacatcattaagaagcgcggcggagatgctgaatagcttccgttaagaactgattaatgcagttagcttaattgaaaacaatttcatataaaaaagagttatcatttttattcaatgtcattaagttaagacattgacaattaatattagacttttaaagcactgatttaacatttaattggttaaattggtgcttttttcgtacaacaaataaggcatagcacagattctgcttttttaagctacgcgatataaataatatacagctgatttgggcttaatatttctcttgtccttgcggcctggtctaattggaatggtataatagctgatctgaataaggatccgttcaaaatcttgcgttaaagaagaagccaaatacatgctctgaataatcaagcatgattgcttgaaattgatggcatattgatacttgcaatgcttttgcggaatataggcctgtgcatcaatttgactgattgcattaaacataatcatatgggcataaatttccatttcaataaatttatcttgtttggaatggaactgtacactgcctaaagaatacttcaatttcttgaaggaggtctcaataccccaacgcagatgataaagctctttaattctttttagcggataattttttcgatcaagattggttagcacaacttcccattcttctttgcctgatttggcatcattaattctaaatttgcaggctcgaaattttattgtgcataactcgccaaaatcccagcttagatcctgggtatttttagagcgatacttaatatattggcgataatgatgctggacatggtgaatattctcactggctttatgcgtgatgtagtaatagttagaagtagttaccaggcaggaaatctcacgatcacattcttgatcaggcaatgtcgttatttctttaactccgccttgtccagccttagttcgtattatgtaatgacagttaggcaggcgattgcagttttcaatcatattgaaactagtgtagccacgatccattgttacaatatatggaccacaattcaaagctttaagcatttgaacagccgctttgcgttcatccatttctgatttaggctgaaaaatacaatcctggtaggtattattcaatagatcatataaggcattaacgtgaatttgacaatagggtttctttttatgagaagaagcttgtacaatgttattcgatttcggattccagatttgattaaagtcagagccatcaatggcaaacaaacggtagtgatgatcaaaaagttgaatattaaatagattttgattaaaaacagtcagaatatgtttaaaacaagcaggagaaagctggcttttgcgttgaacataggcagaagtactaactactttatcgttctttttagttgcatcttcgccaaaagctctaaagagttcactgtttaaattctgaccttgcatgttaattgtagttttaaggactgtcgctgcatctaaagtgcgtttcctggtaaaagcatgaggattattaataaaatcgtgaatatgatccccagtattattgataatttgatcaagacgttctagaatattcttatgaagggctttcataattaacaccatctttctggcaataattttgaaggtttaaaatatataatatataagataggcgaaaaggctggtcttttcgcctttattttatacaaaaaaagagatcgaatccaaatgattcgatctctaaaaaagcacccttaattgtcaatgtcttaacttaatgacattgcatttttattttgataactctttttttgtaaataaatttaagaaaaaagtcgtaaacccttgatatttaaggagggacaaagtacaatagtttttgtgcttatgggacagtgtgcccttaagtgtgaaaatcgttgtaaagcgttgacgcaaaaggttgcggcacgccaggctgcattgccacagtggcgtgcggggaatttttgccgagcgagtcatcttttaaagaagacgttaaggaggtaatttaatggcaagtcaaacaattcgtattagacttaagtcttacgaacatggtattctcgatgaatcagctgctaagatcgtagctactgcaaagagaactggtgctgaaatttcaggtccagttcctcttccaacagaaagaactttattcacagttcttcgttcaccacacaagaacaaggactcacgtgaacaattcgaaatgcgcactcacaagcgtttaatcgatattttgaatccaacaccaaagactgttgattcattaatgaagcttgatcttccaagcggtgtagacatcgaaattaaactgtaatttaaatagaaagaggtgtaaacatgaccaaaggaatcttaggaagaaaagttggtatgactcaaatctttactaaagatggtgtccttgttcctgtaactgttgttgaagcaactcctaacgttgttatgcaagttaagactgttgaatcagacggttacgaagcagttcaattaggttaccaagacaagcgtgaagttttgagcaacaaaccagaaaaaggtcatgctgataaagcaaagacttcgcctaagcgcttcattcgggaaatccgcggtgttgagcttaaggactatgaagttggctcagaagttactgtggatacatttaaggaaggtgacgttgtaaacgttactggtacttcaagaggtcatggataccaaggtaacatcaagcgttggggccaatcaagaggaccagaaactcacggttcaagataccacagaattcctggttcaatgggttccatcattaaccgtgtaccaaagggcaagcgcttgccaggtcacatgggtgtgaagaaagttaccattgaaaacttagtaattgaaaaagttgttgcagacaagaacgtattgatgattaagggtaacgtcccaggtgctaagaactcattaatcgttgttaagactgcttctaaagctgtaaaggctgataaataggaaggaggactagaatggctaatttaaaagttatggatcaaaacggtaaagactctggtgaagttactttaaacgataaggtttttggtattgaaccaaatgaaagtgtcgtttttgaagcaattattagacaaagagccggcaagcgtcaaggtacctcaaaggttaagaatagatctgctgttcgcggcggtggtaagaagccttggagacaaaagggtactggtcgtgctcgtcaaggttctatcagagctccacaatggcgcggtggtggtacagtctttggcccaactccacgttcatacgcatacactatgccaagaaagcaacgtcgtttggctattaagtcagttctttcccaaaagttgattgacaatgatttaattgttttagataagttgactatgtcagctcctaagactaaggaattagtatcaatgttaaacggcttaaatgctgacggtaaagttttaattgtttcagatgataacaatgtacaactttccgcaagaaacttgactaaggttaaggttgttccagttaatggcttaaacgttgaagatgctgttaactatggcaagttgatcttagatcaagatgctgttaagaagatcgaggaggttttggcttaatggacgcacgcgatatcattttaagacctgtcattactgaaaagtccacgaacttaatggatgataagaagtacacattcgacgtgcttttaactgcaaccaagacacaagttcgcaatgctgttgaagaaatcttcgatgttaaagttaagaacgtaaacattatgaacgttcgcggcaaggacaagcgagtaggtcgttacactggtaagaccgctcgtcgtagaaaggctatcgttactttaactaacgattcaaacgacatcaagattttccaagacgataacacagaagacaacaagtaataggaggtcagtcaattggctattaagatttacaagccaaccacgaatggtcgtcgtcatatgacttcttccgactttgctgagatcactaagacaaagcctgaaaagactttacttgaatctcaatcacatactgcaggtcgtaactcatatggtcatatcactgtaagacaccgtggtggtggtcacaaacaaaaataccgtatcatcgactttaagcgtaacaaggacaacgcaaaggcagttgtaaaggctatcgaatacgatccaaacagaactgctaacattgctttgcttcactacactgatggtatcaaagcttacatcttagctcctaagggcttaaaagttggcgatgtagttgaatcaggtgattcagttgacattaagccaggtaacgctttggaattaaagaatatcccaactggtacttcaattcacaatatcgaattaatgccaggcaagggtggccaactcgtaagaagtgctggtgcttcagctcaagttttaggtgctgatggtgattacactttagtaagattacaaagtggtgaagttcgtaagattttgtcatcatgccgtgcaactatcggtactgttggtaatgaacaacactcattgattcaattaggtaaagctggtcgtaagcgttggttaggcaagcgtccacaatcacgtggttctgtaatgaaccctaacgatcacccacatggtggtggtgaaggtaaggctccagttggtcgtcctcaacctatgactccatggggtaagaaggcacgtggtattaagactagagataccaagaaggccagcgagaagttaatcattcgtcaccgtaaaggtagcaagtagtagaaggagggttaattaatgagccgtagtattaaaaaaggtccttttgctgatgcatcattgttaaagaaggttgatgcacaagcagatgcagataagaagcaagttattaagacttggtcacgtcgttcaactattttcccttcctttgtaggtttgactatagctgtttacgatggtagaaagcatgtcccagtatatgtaactgaagacatggttggtcataagttaggtgaatttgttccaacaagaactttccacggacacaaatccactgatgataaagccacaacacaagcttagaggaaggagaaacatctaaatggcagaacaaattagttcagctaaggctgaagcaagaactgttcgcatcgctccaagaaaagctcgtttagtcgttgacttaattcgtggcaagagcgttgctgaagcattagcaatcttggaatttacgcctagagctgcttccccaatcgttgaaaaagttttacgttcagctattgctaacgcagaacataactacgatcttgaaagtgcaaacctttacgtatcagaagcttacgtaaatgaaggtgcaactttgaagagattccgcccacgtgctaagggtatggcttctccaattaacaagagaaccagtcacgtagttgtagtagtttcagaaaagaacgattaagggaggtatattaatgggtcaaaagattaacccaaacggttttcgtctcggtgttatccgtgattgggaatcaaaatggtatgctgacaagggatacaaagaaactttaaatgaagaccttcaaatcagaaaatttatttcagaaaagttgaaggatgcctcagtatctactgttgaaattgaacgtgcagctaacagaattaacatttcaattcatactgctaagccaggtatggtaattggtaaaggtggttctgaagttgaagctttgagaaaacaattaaatgctttaactggtaagcaagttcacattaatattgttgaaattaagaaaccagatcttgatgctaagttagtagcagatagtattgctcgtcaacttgaagctcgtattgctttcagacgtgctatgcgtcaagctactcaaagagctatgcgtgctggtgccaagggtattaaggttcaaacttcaggtcgtttgaacggtgccgatatggcaagaagagaatggcacacagaaggtcgtgttccattacaaactttgagagctgatattgattacgcttgggtaaatgccttcactacttatggtgaaattggtgttcaagtttggatcaaccgtggcgaaatcttacctactcgtaagaataagccagcttcaaagccagcgaagggaggaaatagataatgcctttagtaccaaagcgagtaaaacaccgtcgtgaattccgtggtaagatgcgtggtgctgctaagggtggtaaatatattgcctttggtgaatatggtcttgaagccctcgaatcacattggattactaaccgtcaaatcgaagcagctcgtgttgctatgactcgttacatgaaacgtggcggtaaggtttggatcagaattttccctcaaaagtcatacactgctaaaggtgttggtgtacgtatgggttcaggtaaaggtgcaccagcaggttgggtagctgtagttaagagagaaaagattatgttcgaaattggtggtgttgatgaagcaactgctcgtgaagctttacgtcttgcttcaactaagttaccaattaagactaagtttgtaactagaagttcggaagtaggtggcgaatctaatgaaggctaaagatatcagagcattaaccactgatgaaatgttagaaaaagaaaagcaatacaaagaagaactcttcaatttgcgtttccaacaagcaacgggtcaattagaaaataccgctcgcttgagcaaagtccgcaagaatatcgccagaatcaagactattctgagcgaaaaagcgttagaaaacaattaatggaagggagctattaacttgagcgaaacaaacgaaagaaatcgtcgtcacgtataccaaggtcgtgtagtttctgataagatggacaagactatcgttgtagttgttgacacttacaagaaccaccctgtttacaacaagcgtattagatattcaaagaagtactacgcacaagacgaaaataacgaagctaaagttggcgatactgtacgtatcatggaaacccgtccattatctcgtaagaagcgcttccgtttagtaaagattgttaagaaatctgtttaatttgcggatttagtgaggggaggattacacagtgattcaaaacgaatcccgtttaaaggttgctgataactctggtgccagagaacttttagttattagagtcttaggtggttcaaagcgtaagaccggtaacattggtgacatcgtagtatgtactgttaaacaagcaacaccaggtggcgttgtcaaaaaaggcgacgttgtaaaagctgttattgttagaactaaatcaggtgcacgtcgtgaagatggttcatacatcaagttcgacgaaaatgctggcgtaattatcaacgcagacaagagcccacgtggtactcgtatctttgggccagttgcacgtgagttacgtgagaacgactttatgaagatcgtctctcttgctcctgaagtcttataattgatagtgaggtgcactgatgttcgttaaaactggtgacaaagtaaaagttattgccggaaaagataaaggtaaagaaggtactgttctttctgttaacgttaagaaaaaccgtgtagtggttaagggcgttaacaagattaagaagcaccaaaagccttcacaaagcaatgctaatggtggtgtagttgaatcagaaggttcaattcacgcatcaaacgttaaagtaattagtagtaaaaaagaagataagtagaagggaggacacacatggcaagttatttagctaaggaatacaacgaaaaggtagctcctgcattagaagaaaagtttaactacaagtcatctatgcaagtacctaagatcgacaagattgttttaaacatgggtgttggtgatgcagtttctaacgccaagaacttagatgaagcagttgaagaattaactttgatctcaggtcaaaagccattaatcactaaggccaagaaatcaatcgctaacttccgtttacgtgaaggtatgtctatcggtgctaaggtaactcttagaggcgacagaatgtacgatttcttgtacaagttaatcaatgtttctcttccacgtgttcgtgacttccgtggtgtatcaactcgttcatttgatggtcgtggtaactacactttaggtattaaagaacaattgattttcccagaaatcgattttgataaggtaaaccgcactagaggtttagatattgttatcgtaactactgccaacactgatgaagaagctcgtgaacttttgactcaatttggtatgccgtttgcaagatagtggaggacattaatggctaaaacatcacaaaaaatcagaaatcgtcgtcctgctaagttctcttcacgcgaatatacacgttgcgagagatgtggtcgtccacactccgtataccgtaaattcggattatgccgtatttgcttaaaggaattagcacacaagggtcaaatccctggtcttaaaaaggctagttggtagtatacggttaggaggatagcttaaatggtcatgacagatccaatcgcagattacttgactagaatcagaaatgccaacatggcaaaacacgattcagttgaaattcctgcatcaaacattaaaaagtctatttcagaaattttgaaacgtgaaggcttcatccgtgattacgaagttgcagatgataacaagcaaggcgttatcaaggtattcttgaaatatggtccaaatggagaacgtgttatctcaggtttgaagcgtatttctaagccaggtcttagaaactacgttggcgctgaagacttacctaaagttcttaatggcttaggcattgccatcgtttctacttctgctggtgttattaccgacaaggaagcaagacaaaagaacgttggcggcgaagtaattgcctacatttggtaatactgacagaaaggagaacaatcaatgagccgaatcggtttaaagactattgaagtccctgacagtgtcactgttaccaaggaaggcgacaatattactgttaagggcccaaagggtgaattaactagatacttcgatccaaagattaagtttgaacaaaaagatggtgaaattaacttttcacgttcaagcgaaagcgacaaagcacttcacggtactgaaagagctaacttagcttcaatgatcgaaggtgtagttgacggttataagaagactttgaagttaatcggtgttggttaccgtgcacaagcacaaggcaacaagattactttaaatgttggttattcacacccagttgtattgactgcaccagaaggtgtttctgtaaaggcaacttcagcaactgatgtagaagttgaaggtgtttcaaagcaagatgttggtcaatttgcagctgaaatccgtgccgtacgtccaccagaaccttataagggtaaaggtattcgttatgttgatgaatacgtacgtcgcaaggaaggtaagactggtaagtaataagtagttatttttgaggtgaaattgtgatttctaaaccagataaaaacaagttacgcttaaagcgtcatagacgtattcgtggaaaaatttctggtactgctgagcgcccacgcttaagcatttttcgttcaaataaaaacatctacgctcaattaattgatgacgtagcgggtgttacgcttgcaagcgcctcaactttggatgaaaatgtatcagatgcaactaaagtagaacaagctgctgctgtaggtaaggcaattgctgaagctgcaaaggcaaaaaacatttctactgttgtattcgacagaagtggttacttataccacggccgtgttcaagcattagctgatgctgctcgtgaaaacggattagatttctaggaaaggagaattaacacatggcaaaccgcaatgattctcgtaacaatcgcagaaacaaagacgatatcgaagatcaattagtcgctgtcaaccgtattactaaggttgttaaaggtggccgtcgcatgagatttgctgctcttgttgttgttggcgacaagaaaggccgtgtaggttttggtactggtaaagctcaagaagtcccagaagcaatccgtaaggctgtagaagacggtaagaagaaaatgatcaatgtacctaaagttggtactactattcctcatgaagttattggtcactacggttcaggtaacattttattgaaacctgctgaagctggttctggtgttgctgctggtggtgccgtacgtatcgttatggatatggctggtatctcagacgtaacttcaaagtcacttggttcaaacactccaattaacgttgttcgtgcaactatcgatggtttgaagaagcttagaactagtgaagaagttgcaaaacttcgtcaacctgaaagagcttaagattagggagatcatagatgactgatttaaagattactttaattagaagtgttgctcaccgtctacctcaacaaagaaagatcgttaaagctcttggtttaggtagagtggatagtactgttgttcttccagacaacgctgctactcgtggtgcattattaaagattgctcacttaatctctgttgaagagattaacaaatagaatatcaaggaggtgccaaattaatgaagcttcatgaattacattctgctgaaggctcacgtcgcaatagaaaacgtgttggtcgtggtacttcaagtggttacggtaaaacttcaggccgtggtcaaaagggtcaattagctcgtcaaggcggtcatactcgtttaggttttgaaggtggtcaaatgccattattcagaactatgcctaagcgtggttttaagaacattaaccgcaaggaatatgcaattgtaaacttagatgatttaaacaagttagaagacggcagtgaagtaactgtagaatcacttaaagataatggcttagtaaagaaagaattgtcaggtgttaagttacttggcaagggcgaattaaaagttaagttaactgtaaaggttaataaagtttccgcatctgctaagcaagcagttgaagccgctggcggaactgttgaggtgatctaatgttttcgaccttgaagaacgccttcaaagataaagaaattagaaataagctctatttcacgctctttattcttttgctgtatcggatcggtgcaaacattaccgttcccggtgttaatgcgaaggcgatcacgcaggttgcgcaaactggtttagttccaatgctggatactgtatctggtggtggactagataactattcaatattttctttgggtgtttctccttatattacggctcagattgttatccagctgctacagatggatattgttcctacgttagtagaatggggaaaacaaggtgaagtaggtcgacgtaaaacaaatcaagtaactagatatttagcattagttgttgcttttatccagagtattggtattacgttaggctttaacgctttaactcaaatgggtttggtaaagaatcaaacaccacagacttatatagaaattgctattattatgactgctggaactatgttattaacatggttgggtgatgaaatcactgataagggtctaggtaatggtatctcagtaattatttttgctggtattattgcaagactaccaagtggtctatggcaaatttataaggaagaaattattaataatagtgctagtgatcgttggcaaggcattttgttcttcatcgcggttatagttgcaatccttatcgtaactcaatttgttacatgggttgaacaagctgatcgtcgtattccaattcaatatacgagaagagcgacgatgagtggttctgaaagttttctaccattaaaggttaatgtatctggagttattccggttatttttgccagttcatttattgttacaccggcaacgattttaatggcctttcaaagaacccagggcgatcaacaatggtttaaagtaatgaaccaaatctttagcttacaaactactcctggggtaattatctacactcttttaattatcttatttacattcttctacgctttcgtacaggtcaaccctgagaagctagcagaaaacttacaaaagcagggtgcttatattcctagtgtatggccaggaaaagatactcaggattatatttcaaagatgttgatgaaattatcaacagtaggttcattattcttgggcttagttgctttactgcctcaattggctactaacttttggaatctcccaagttccattggtttaggaggaacaagtcttttaattgtgattggggttgttctcgagttatctcgtcaaattaacggcttgttaatgaagagagaatatgttggattcatcagataggaacggataaatgattaacttaattcttttagggttaccaggtgctggtaaaggtacagcatcagagcgaatcgttgataaatatcacttaactcatatttcaactggggatatgtttagggaagcaatggctaacaagacgaaggttggtcttgaagctaagagttatatcgataagggtaatctagtacccgatgaagttactgcaaagttggttgaggaacgtttaagtcaacctgatattaaagaaggttttatcttagatggttttccaagaaccactgtacaagcagaacttttagatggtattacaaaacgtttggagaaacctttaacaaatgtcattgcgcttgaagttgacgaagacactttgattaagcgtttatcagcaagatacatgtgtaaaaattgtggagctacttacaacaagctttccaagcagccaaaagttgagggcacttgtgatcgctgtggtggccatgaattttatcaacgtgaagatgataaaccagaagttgttaagaatcgtcttgaagttaatgaaaagatgaatgcacctttgaaggacttttatcagaagaaaggcttgctcactgtaattaatggtgaacaaactccagaaaaagtctttgaagatattgatgcggtattgagtaataatcaatagaagaaaaatttgtataattttttatccgtgttataatttcaaagtatatgactgtttaattgcggaggaacaactttggcaaaagatgatgtcattgaagtagaaggtaaggtagttgataccttacctaatgctatgtttaaagttgaattggaaaatggagccacaattttagcacacgtttctggtaaaattaggatgcactacattcgtattttgccgggagaccgtgtgactgtggaattatctccatatgatttaactaaaggtagaattacgtatcggtttataaagtaatataacggagggaaacatgaaggttagaccatctgttaaaccaatgtgtgaacattgtaaagttatcaagagacatggccgtgtgatggtaatttgctcagcaaatccaaagcacaagcaacgtcaaggttagaaatagagggggtgtagtttatggctcgtattgctggtgttgacttaccaagagataaaagaatcgttatcgctttaacttacatttacggtatcggtgaagcaactgccaagaaaatttgtgctgatgctggagtatctgaagatattcgttcaaaggatttaactccagaagatcaagaaaagcttcgtgctgaagttgacaagtaccgtgttgaaggtgacttacgtcgtgaagtaagcatgaacattaagcgtttagttgatattggttcttaccgtggtattcgtcaccgccgtggacttccagttcgtggccaaaataccaagaacaatgctcgtactcgtaagggtactaagagaaatcgttaattttatttataaggaggtttattgatgcctgcaaagaaaacagcacgtaagcgtcgtgtgaagaagcatgttgaaagcggtgtagcacacattcactcaacgtttaataatactttagtcatgattactgacgttcaaggtaatgcagttgcttggtcttcagctggtgcattgggctttaagggtagtcgtaagtctactccatttgcagctcaaatggcagctgaagcagcagctaagagtgcaatggaccaaggcatgaaacatgtagaagtttcagttaaaggtcctggtgctggtcgtgaatctgctattagatcacttcaagcaactggtcttgaaattactgcaattcgtgacgttacgccagttcctcacaatggttccagaccaccaaaacgtcgtcgtgtttaattttgtccttgatataggacgtaacgttttgaaaggggcccagtaatgattgaatttgaaaaaccaaatattaccgttgttgaacaagaagattcttacggtaagtttgttgttgaaccacttgagcgaggctttggtactactttaggtaattctttaagaagagtattacttacttctattccaggtactggacttgtttatgtgcaaattgatggcgttttacacgagttctcaacagttcctggcgtcagagaagatgtaaccaagatcatcttgaacttgaagaaacttgaattaaagtctctttcagatgaacaaaaggttattgaattggacattgaaggtccagccacagtaactgctgatgatcttaaagttgatgcagacgttcaagtcttgaatccggatcaatatatttgtaccattgctgaaggtggacacttgcatatggaacttgccgtaaagaatggtagaggttatgttgctgcaagtgacaataagagtgatgacatgccaatcggagttatcccagttgactctttattctcaccaattaagaaggttaactaccaagttgaatcaactcgtgttggtaagagagatgactttgataagctcacttttgagatttggactgacggttcaatcaagcctaatgacgcccttagttttgctgctaaaattttagttgaacactttaaggtatttgaatcagcagatgcaaatgctaaattcagcgaagtaatggtggaaaaggaagacgataagaaggaaaagaagcttgagatgactatcgaagagcttgacctttctgttcgttcatataactgcctgaagcgtgctggcattaatactcttcaagagttaactgacaagacagaatcagatatgatgcgtgtacgtaacttaggacgtaaatcattggaagaagttaaaaataaattaaccgacttaggtctttcacttcgtcaagaagactaagcttaggtgaataaaggaggcaaatccatggcataccgtaaattaggtcgcgatagtgctcacagaaaagcaatgcttagagaaatgactactcaattaatcatgaacgaacgcattgttactactgaaactcgtgctaaagaagttcgtaagactgccgaaaagatgatcactttaggtaagcgcggcgatttagcagctagaagaaaggctgctgcatttgtacgtgacgaagttgcagatgttcacgaagaaaaagatgcagttgttgttaagtcagcattgcaaaagcttttcagtgatgtagcacctcgttacaaggaccgtaatggtggttacaccagaattttgaagttagccgttcctcgtaagggtgacgctgctccaatggttattcttgaattagtttaatttagagtaacacaacttaatacgtattaagaattatccatgaaagtgagaataagcgtaaagatgatggcgcaagcttagtctagcttagatgataaaaatcatccctcttcatgggtgattttttttgctctttttttctgttacaatatgctaataagcgatttaagaaaggaagtggaaaaatgccagtagatagtgctgttgaatttaaggatgtctcatttacctatcccgatactaaaaaagcgattcttgatcagattagttttaaaataaaaagaggttcctggacatctttgataggtcacaacggtagcggtaagtccacaatttctaaattaattaatgggttacttttgcctgattctgctaataattctagaatcactgttttaggaatgacgttaaatcaaaagacagtctgggatgttagggaaaaagtcggtattgtatttcagaatccagataatcagtttgttggagctactgttggcgatgatgttgcttttgggcttgagaatagagctgttcctcgggagcaaatggtaaaaatagtcagaaaagttttagcagacgttggaatgctggattatatagatgcagagccagctaatctttctggtggacaaaagcaaagagtagcaattgcaggtattcttgccgtagaaccgaaaattattattttagatgaatcaacttcgatgcttgatcctaaggggagagagcaggtgctaaaaattattaagcatttaaagaaagagaagaatttgacagttatttcgattacacatgacattgatgaggctaatatggctgataatgtgatcgtcttaaatgatggcaagattttagctcaaggaactccaacggaaatttttagtaaaactgaaatgttgcaagaaatagggctagacattccatttgtacaaaaattaataaataaattaaatgaagtgggaatttctgtacctaaaaatataaaaacgaaagatgagttgaaacaatatctatgtcaattaaatttgaaaaagtaaattatatctattctcccggaacttcaatggagaaaaaaggattagataatgtttcatttgaattaactgaaaatagttttgttgcattggtaggtcataccggtagtggtaagtcgactttgatgcagcattttaatgcattactgaagccgagttcaggaacaattgatattgctggttatcatattactgctcaaacaggaaataagaatttgaaaaagttacgcaagcgggttagtttggtttttcagtttcctgaagcacagctttttgaaaatactgtgcttgaagacattgaatttggtcctaaaaactttggagcaaccgatgatgaagctaaaagtaaagctttgaaatggttgaagcgagtaggattggataaatcgctagcaaataagtcgccatttgagttatctggaggacaaatgcggcgtgttgcaattgctggggtaatggctgatgaaccagaaattttatgcttagatgagccagcagcggggttagatcctaagtctcgtaaggaaatgatgaaattatttgttgactatcaaaaagcaggtcatactgtaatcttggttacgcataatatggatgatgtggccgaatatgcagatgatgttttagtgatggaacatggtaaattagttagacatgatgcgcctaaggcgatttttactaataaaaactggctagaaaagcactatttgagtgaaccaacggctagtctttttgcctcagatttgacgaactttaactttaaagataaaccgttaacactggatcagcttattaatgaaattaagaaaaatttgcgagggtagtttatgagtaagataattgtaggacgttatattccgggagattctcttatttataaaatggatcctcggagtaaattattagttaccatattatttatattggctatctttttagctaataattcaataacttatgcgattgtgaccattttttgttttttggctgtgatcgctacaggattaaatgcaaaagtattttgggatggcgttaagcctttgattggtttaattttctttacgtcgcttttgcaattgttttttatgactggtggtcatatttattggcattggtggattttttcattatctagctatggtttgattaatgcaatctatatttttattcgttttacattaattattttaatttcaacagtaatgacagttactacaatgccacttgaaattgctgatgcgatggaatggctgcttaagccgcttaagttgtttaaagtgccggtggataaaattgcgttagtaatttcaattgcgcttcgttttgtaccgactttgtttgatgagacttttaaaattatgaatgcgcaaagatcacgtggagcggacttcaatgacggtggtttaattcaacgtgctaaggcaattacgcccattttggttccgttgtttattcagtctttagaaacggcaattgatttatctacagcaatggaatcacgtggttatcgtagtagtgaaggacgaactaaatatcgcgttttaagttggtcaaaatatgatttaattgcattattttattttgtactgttagtcggattactattaacttttaggacatattagaaatatgacgacaagatataaaatgacgatggcttatgatggtcatctttttcatggctttcaacttcaaccagaccagcgaactgttcaggggacaattgaagatgcgttgaagaaaatgactaaggggcagcgtgtgattgtgcaggggtcaggtagaactgatgccggtgtacatgcggttggacaggtaattcattttgattatcctggtaaaactattccagccaatcgaatgattttggcaatgaattctatgatgccaaccgatattatctttgatgattgccaaattgttgatgagaattttcatgcgcgttattcgattaaggggaaatggtatcgctatcgtgttagtttagatcattttgttaatccatttaaacgtttttatacaggacattttccatatccactagatattgaaaagatgcaaattgcggcacaagatttgttgggaaaacatgactttactagttttgcggctagtggtggtcgaattgaagataaagtgcgaacaatttattatgtaaaaatcacagaggataaaaaagataatgaagtgatttttgacttcattggttcaggattcttatataatatggttcgaatcatggtagcagcgttgcttgagattgggaatgatcgtagaccagtgcatgatttgcagcgggtaatcgcggcaaaagatcgacaagaagtgagacaaacagctcatgccagcggtttatatctttatcatgttttttatgatgaagtaccacaaaaatatcgcttagatcagcatttataattgacattttgcctaaaaggacgtactctaatatagtatgtttgtccacgataggccccggaaacttattgttttcaaactgcaaataaacggaggaatttaaattgcgtactacaccattagcaaaatctagtgaaatcgaacgtaagtggtacattattgatgcaactgacgtaacccttggtcgtctttctgctgctgttgccactattttgagaggtaagaacaagcctcaatacacacctaatgttgatactggtgataacgttatcgttatcaacgcatcaaagattagattgactggtaaaaaggcttcagacaagttctactaccaccactcatcatggcgtggcggcttgaaggccgtttcatacggtgaattgcttgctaataacccagttaagatggttgaaatctcagttaagggtatgcttccaaagaacactcttggtcaccatgaattcatgaagatgcatgtttatgctggcgaagaccacaagcacgaagcacaaaagcctgaaaagttagatattaacaaattaatctaggaggttatataatggcacaacaagctgcatacacaggtactggtcgccgcaaggattcagttgcgcgtgttcgtttagtaccaggtaacggtaagatcactgttaacgataaagatgttgatcaatacattccattccctaacttggttaaggacttgaagcaaccattgacattaactgaaactgaaggtcaatacgacattcacgttaatgttaacggtggtggtttctcaggtcaagctggggctatccgtcttggtatcgctcgtgcacttcttgaagttgacccagacttccgtagtccacttaagaaggccggtttcttaacccgtgacccaagaatgaaggaaagaaagaagccaggtttgaagaaagcccgtaaagcttctcaattctcaaagcgttaatatttacgttcaaaaatgttgttatatcaacgttttggagacttcagttggtcacctatggtcacaatgctatagggattccaatagatttaaagcattcgcatcttgcgagtgctttttttctggcattaattccagatagtatttttcagtagttaagattgaatcgtgtcctaatcttctgctaacataagataaaggaatattattactgaataaaaaagaagcgtgggtatctcttaaaccatgaaatgtggttgaagggatgcctatttttttgagcaattcttttaacataccagactgtttaaagctgaaccagtcaaacaaatagccagaatctttttgagagatatccttcaatagatcgtaaatattcttaggaatagtcacactgcgtctagaatgtttagtttttaatttagtatcgtcagtagtagggctaattgatcgttttacttcaacgcaataatactgaccatcgtaatgcacatcctcaggcttaatacctaaaatttcaccacgtcttaaaccagtactaatctcaagtaataccattaagttaaattcattatctgtatgttcaagtaagtaatgttttaacttagttagatcagacattgatgaagctttattgcgtttaggtaattcttttccgtgtgctttaagtaaactagcaaaatcattgtaaatgtatcccttaacataagcatagcggagagcagttctaattttcttaagtaattcagttaccgttttcttagaatgtgttttgccatatttatctaagatactttgcatttgtacgtcatcaagcttaccaagtttagcggttggaaaaagattatcaattactttaccagctttaacataattatcaaaagttgcttttctaacgtcatgtacttttactgtttgaacgaataaataataaaagtccttgaataaagtgttttgctgggctattgcttgacctttagccttttgtagttcaagagtagtactccaaactttagcttctttttcagttttaaaactcttagttaagtaatcacgttttccgagactgtaaaatagtttgtgtaaggatgaatgattccttaaatttatttctttaaacattagaaaaaggagttcctttctcgtatgattggtttgaacaaaaaaaacacatacagaaagaagaactccttcatgaatgattttaccaaagattttgctcaagctctattcaatccagacaaaataaatgatttattgcgcaaagaactacaacaggctgttaataacttgctagaagctgaattgactgcctttctgggctatgatccctatgccagaaatggctggaatactggcaactctagaaatggtgcttatttccgcaaagttgatacgcaatttggcccaattgaagtgcaagtgcctcgggatcgcaacggtcaatttcatcagcacacgctgcctgactacaagcagcactcggatatcttggaaagcatgattatcaagctttactccaatggcgtgaccaccagggaaatagccgatctaattgaaaagatgtatggcagccattacagtccagctcaggtatcaaatatttccaagcagatgattccaaaggttgaggcttaccacaaacgcaagctaagcgacaagtttttctgcgtctatttggatgcgacataccttcctttgcgccgagaaacgtttgagcgtgaagcagtctatattgccattggcattaaacctaatggacataaggaagtcattgactactgcattgctcctagtgagaacattgaagtctggacagagatgcttcaaaacatgaagtccagaggcttgaagcaagttgaactctttctttctgatggtgttgttggcatgaaaacagccttggccaggacttatcctaaagctcattttcaacgctgtttggttcatgtcatgcgcaatatctgcgctaaagtacgcgtcgacgatcgtgaaaagatcatgaacgaattcaaacaggtgcatcaacagacaaacaaaaaagaagctgcagctgtcttgcacaaattctatgccaaatggaataaagcttatagccatgtcatcaaaggtttgaaggaaattgagcccgatctgctagtcttctacaattatcccaaacaaatcagagcttcaatttattcaaccaatatgattgaatcctttaacaacgtcatcaagcgtaaagctaagcctaaggcagaatttccaactgaacagtcgcttgatgcatttattggcatccaggcaatgagctacaatgaccgttatttcaatcgaattcataaaggctttggtcaggttcaggacaccttagaatcctactttgattaaataaataattaaaaaatcaatttacgagaaagatctatttacacaaaagatttgacagtttccgttttccatgttgatagattgttactctggctctatatgatgagccacgtttttcaatacttgccataaatttaatcgtcctttcaaaagaaaagccgattatcttaccagcaataaagttagcagataaccgactatttctcaaatctttttcaattttgtttctttaagatcgatgaaagcttcgatacttttaatggtaaagcgttctgtgtgttctcctagtttaaatcttttaaagtcaggatcagagcgaaatactttatcaaaagttttgggatcaataccaatatattttgaagcttcttcgcgagttaataatttagccactattattctcctgagattgtttagttaccaatattgagataaaatctaggtagtaggtaatctagtcattgcttttgtctctattagcatgactagtatttttttgcgattttatcttccaaattgcttcggataatttatcatcagtgattagatcatttttaactttattagtattgcttttagtaagttgcaacgggataattcgtcttttcaactgttcaaaagaatcaatgacttgattagcaatattacattcaagataaaaactaagtggatcataaggggtagtgatgtaaatggcacgcgcatttagataacgatcgtgataccttgcgggagccattttgtctatttcccaaggatccaaaagggtaagtagttgaccatagtcatagtcatttggtcgcaagtcattaattactatgaatttttgccctttgtattcttgaaagtgatcccgttgactacctgaaatacagaaatcttcaggatgttgtttttctaaaatttcccgtactaacttagtcttaccaattccggaaacaccatatatccagtagaccttacaactctgacctttgaagtcctttaaaaaccgttgatgctttttgtaagctaggatgtcttcaatatgatctaacagtgttttatgttttgccatctcaagaacaccgatttcttcttgaagttcttctttagtgattttttcatttgaataatcatcaataaagttttcaattgcttgtcgtgatggctttttgactttttgtctaatctcattgattctatctttaaaatcaaatgaagctactacttcttttggatcataatgatgtttactcttagcattagtagtttcatggatcagatagctatagccattgttaataatactgtgccatgcttcaatatattgttcatgatcattgaaaatcttagatactcttgaaatggttttagcatctttgaaatgaagcattacatgatagtgaggtcgaatcttttaacttatctttactaaatggtaaatgatctaaatcttgggtatacataaagttgtgagaacgtattatttttttcacaattaaagatttcctttctattcaacacgaactacatattaactttggggctagataacaagttcattattactttatttttgtttatcagatggaaagcaattgcaagaagcagcagatatattagccaaggctaaggtgcatctatctatggtgatattttcaccttaaatcaaactgcagcagctatggttaaagttgctcaaggaggtaataagggtaaagtattactgcaaatgaatgaagcttaagttaacatgaaataataaatacatttagataaagaaagaccctcaaagattctaaatttgaatttttgagcgtctttttagattgctaatcattttaaaggtacttgtattacatttactcctgctttaataaattcattaattacactgttttctacaaaagtatcagttattaataaatcaatatcttttattgttccaatagtaaaattagagaatttattgaacttgctatagtcggcaacaacaataaccttttgtgattgctgaataatagttttattaacttctgcttcttccataactggtgttgaaataccttggttaatgctaattcctgcgcaaccaataattgcatagttggcacgtaaagatagaaatgctttagttgccaaatcaccgctcatgattaatttatgatgtatttccccacctgttaagatcactttgcttttagtattttcaaaatttccagcataaccattgttagtaacaattattatatcctttgttaataaatgtggaattgcatcaaaggctatactactagagttaataaatactatatctccatcgtgaatatatctggctgcctcttttcctaagctttgcttaatgtaactaacgggctgagataatgggatttcttctggtgcaacaagggatatgacaccacgcttttttgaaatcttacccatttttgacaaataatcacagtctcgtcgaatagtcatttcagaaaccttcatctttttgcttaattcagaaatagaaatttcccttgtgtgatttagtaaatcaatgatttgcttgcgacgttttttaattacttgaattgaatttttcatttttaatgatctctttcacttcaataaatacttactaatacttcaccagaaaagcattaacttttgaatttaaataaaaaacgacccgaactggttactattttaccattcaaaataataattcacatattttatgttataaagtaagtgtcaatgtttttgcggtagcctttaaaccattagtctaaccttaatttcttaaatatttatatgacttaaatttctgcttagcttgcttaaataactattgccagctacctgtgcggttaatgcgccatgctggatgcctaaatgaacttcatgacgcttctttaagctgtcacgggccgctgcttttaattcctgttcagtcaatacagttatttctgaatcttcaaactcgctgctaagccaaaattccagctctcgattcttgatgcagcttaagatcctaagcatgccttctgctccagattttgaccatttcttgccttgccccttaacacggtaggtatacttgcggtggttgctctcgcagcagccaatggctttagtcacagtcagttttcgtttcttaaacggcttaatatcgtcccaatgacgatcaatataattccttaggcgccccagataatcatgattgagctcggtattcaattcatcaattagtcggctttctgcagtggttaggatagttttaactttgtcatagctgtatttgtattccaaagcagaaatcagcttgccttgcaggtcaggcgcaaaatatagcctttctttgattttcttatttaggtgaaagacatccaagaaatgctcatgacgcttgcatagccctacaatgtcatcgaagtctgttttggcatatccagcaccgccatcggcgttgctaagaattacagtatcagaaagatcataagtattggccaggtactccttggcttcgttcagcgcatcaagtcggcttaaagaaacaaattccttggcattgattcgctttctgcgtttcttgcttatattgacaatgccttcacagacctgatagcgatgaaattccaaccggcttttagtgcctttgatcaccacgccatcgccttcaagatacaaaactgggacctttttcttagtgcctgcggcatcatatcttgaatctgcttcttggcccgctttaatatttttcccggccatttttaccaaattgcccacctgcatatggctaatattaaagccagacaggcaattgactgctagagcagtattgcgataagtggcaacgctgcttacttctaagatgtttttgactgctaaaatactgtagcgcttgtatttgtcaaagcccattaattcatccaagggataccttgcttgtttgcctgggcagacatatcttcttctgacatacctaacttcgccaaaagccatattgattgagcgctcattcttcttatcaatctgatagccctgtgctttaaccttggtaatcatttcatcatcaactttagctaaagccaaggccatgatttccttaatcaggtttaagaagaaacagattatttttctttcacgcttaatataattatcttcagactttataatatttgcgatttcagttacaattgaattcataaaagaccagcttctaatgtgttttttgttcttaacatcagactactggtctttttgtttgagctcaagtccaaattcaaaggacttgggcttttttaattatttattcaacttaccgtaaaaaattatacacttagtgttataaatgacttgaattttacaaaaattaacataaaatatgctaaattaacatatataatggttgaaagcactcacatctaagcgcataataacattgaagacgaggataagaaaattaaggaggatttattcatgtcagcaccaaaaaaaatagaagatgttaatttcaaaacttttgcagaaaacaatttcccagaatggggtacgttcttgaatgaacaaattgctgataagcaagtaccagaaaaaagtattgcaatgtggtggttaggctgtatgggggtttggattaagactcatgaaggcaccaacgttgctattgatatgtggaacggtactggtaaacatactcacggtgacggtaagatgcgtaaaggtcaccaaatgatgcgtatgaccggtggtgaagctttacaaccaaaccttagaaacaagccatatgtaattgatccatttgcacttcgtgatcttgatgctttatgtgtaactcacactcaccatgatcacttggatatttacactgcagcatgtgtaaacaagtattgcccagacgctaaatttattggacctcaaggcgttgtcgatgaatggatcgaatggggtgttccaaaggaaaagaccattgttgtaaagcctggcgatgaagtcaaggttggggccgtaactattaaggcaatggaagcctttgatagaactgaatttgttaccgaagatgatccaaacaagaagttagcaggtactatgccaattgaaatggctaaagttgctgttaactacttagttaagacttcaggtggtaacgtatatcactcaggtgactctcactattcaaacacttacgtaaagcacggtaacgaaaacgaaattgacgtaactctatgtgcatacggtgaaaacccacgtggtatcactgataagcttgacgactcacaagttttgagaatgggtgaagctttaaagacaaaagttattattccaatgcactatgacatttggactaacttctacagtgatcctaaggatattttagctctttgggaccgtaaaaagtaccgtttgcaatataaatttaagccatatatttggcaagttggtggtgaatttgattatccacaagacaaagataatttcgaatacatgtatgatcgtggattccatgatgcatttaagaatgatccagacttaccattcccagaaatgctatagtcccgtttttgttgattaactagctcaacgtctttaaccaaagctgttgagctgagggaggagacgctgatgttacgttactttttagaaaataatttattaaacattactgatgaacatcctgagacttgggaagaagcaattagagttgctggtaaggtaatgaagcaagacaagttagttactgatgattatattgattcagttattgctgatgttaagaaatatggtccatacattgttattgttcctggtgtggcaatgccacactcaaaggctgatagcgaaggagttttaggtactggtataggtcttacaattttgccagaaccagtttcattcgatgaatcagacccagataaaagtgcaaaattattctttatgctagcagctaaagataataatacacatgtcaaaaatattgcccatttatctgacatgttaatggaagataacatgattgatgatctttctaaggttaagaatttagacgattataaggcagtaatgaagaaacataatatgtgatatcggaagcggggagtataaatggctatattaaatattctatctaagatatgggattattttgctaccaatattttgcaacaaccagctttcatgattggttttattgtcttacttggttatatcttagagaaaaagaaatggtatgaggtcccaatgtcattaagttaagctattgacattggagaaaaaaacaattaaagcatcatttggctttagatagccaatttgatgcttttttgcgtatgctaaataagcgtagtttgtatttcttttttaattaggccacgcgatacatgtaatatactgcagacttggcttttaaatttcgtttgtcttttcgcctttatttttgcaaaaaaaagaatcgaatccaaatgattcgattcctaaaaagatcagttttcaaaagtcaatagcttaacttaatgacattgatgaggtcctttcaggcttcttgaaagcaacagttggatactttattttatcggctggttctgttggactgatcaatacttttagaccaattttagtcggattaaaagatcgttttcatttgaatgcgatggtaactgatccatattttggacagaatgcagttgctgccggaattatgaaagagtttggtagatcttttgccgatactatgcttttgttgttatttgcatacattatcaatatcgtgttagtaagattttcaaaatatactaaattacgtgctgtttttacaactggtaacgtgcaagtacaacaagcggctaccgctttctggttgatcttgttctgttttccaaaattaggtcatttacctattttaatcgttatgagtattatcttaggtttatattgggccgttggttcaaacttaactgtagatattactcaagagttaactgatggtgctggctttgctatcgctcaccaacaaatgtttggtatctttattttcgctaaattatcagaatttttggaaaatagagccaaaaagaaaggtaagaaagaagccagacgattagaagatgtaaagttaccaggtttcatgtcaattttcaacgacaatatggtatctacatcaattttgatgttaatttttatcggtgcaattttagtagtattaggtccagattacttagttaaagctaaatttatgcaacctggccaaagttttattttctacatcttacaaacttcattacaatttgcagttttcttagcaatcttacaattaggtgttcgtacattcgttaatgaattgactgaatctttcactggtatttcagacaaatggttacctggctcagttcctggtatcgatgtcgcagctaccttaggttttggttcacctaacgcaggtacaattggtttcttgtttggtgcattaggacaattcacaatgatcattttattgttgattttccactcaccaacaattgttatcgccggatttatcccgttattctttgataacgctgctatcggtttgtattcaaataaccgtggtggtttcaaatatgcaatgatcatgccttttatttctggattgatccaaataggcgggtctgccttaattgctacctgggtaggtatggcgaaatacggtggttacatcggaatgttcgattgggctacagtttggccattcttcacagtattgatgaaattcttaggctttgttggtatttgctctttaataatcattttggtaatgattcctcaattgcaatatcgtgccgataagaaaggttacttcatgattactgaagattatgaaggttggaagaagttacatggtaaagaatagaggttaattaaaatgaaaataatgtcagcttgtgctaatggttcgggaactagtttaatgctttctagaaccgcaagaaaagcaatggaacaattaggttatgaaattacagtttcagatcatacttctgtttcagaagctagaggaactgctagaaactatgatgtggtatttacatcattaccttttgtgaacatgtttgatgaagtaaagcaaaagggtggcgaagtaattggcgttaagaatgtaatgtcagttcctgaagtaaaagaaaagatcgaagcttcagatattccaaataagtttaagaaataatcttaggagaattaatttatggctttaccaatgttacaagttgctttggattgcgagagtactgctgaagctttaaatgtcgcaagacaagtaatggatcaagttgatgttttggagacaggaaccattctttgttatcaagatggtgtaaaggccgtatctgctttaagagcagtgggaccagataaaatagttttagcagatgttaaatgtgctgatgccgggactaagttcggtaaggcaagcaaagatgcaggtgctgattggatgacttgtattaacgctgctactgttcctaccatggttaatgctagaaaagaaattgaagttcaagttgaattatatgaaggctgggacaataaagaacgtatgcaagaatggcttaacaatggtattgatcaagttgtttaccaccaaagtagggatgcaaaatttgcaggccaaaaatggggcgaaaaagatgttgcaaacgttaaggccttgattgacatgggctttaaggtttcagtaaccggcggagttcatccggaagttttgaaattatttaaagacttaccagtgtattgttttattgccggccgtgatatcagaaatgcggaagatccacatgcgcgtgctaagcagtataaagatgaaattaagcgcatttggggttaatcattaattttactcatattaaaaaattccttaattagttttagaaagggcaatgcacgtaaaaacgtttattatgcattgctctttttgtattaaaaggcaggtataggttatgactgtaaactcattaggtatttacgaaaaagcattaccacaagatttatcttggaaagaaaaatttaatttagttaaaaaattaggcttcaattttttagaattttctgtagatgaaagtgatgcacgcttagcacgtttggattggaccaaggaacaaagaaaagaatttagagatttaatgtgggacactgacattcgaattaataatttgatgttatctggccacagaagatttcctcttggatctaaagatccagaaaccagaaagaaatctcttgaaatgtgccaaaaggcagtagatctctgtgtagatttaggaattcataatattcaaatggcaggctatgatgtttattatgaagaaaagagtgagaactctagagaattatacgttgaaaacttagctaaatgtgttcatatggctgcaaagaaaaacattatgctttcgattgaaacaatggatgatccatttattactaacattgcagatattaaacaatataaaaagcaagttagaagcccatggcttcaagcctatccggattggggtaacctctctgcttggccacaaaatgatcctgctaaggatttagagaatggaattggtaatattgttgccatccacttaaaagatactctggcagtaacagatggttttgagggtaagtttagagatgttccatttggtgaaggctgcgttgattttgaaggactacttcgtgaattagtaagactagactataacggaagttttacgattgaaatgtggccaggtgataacggtgatgatgatcctgttgctgaagttaaagaggccaaagctttctttgacaagatctttaaaaaagttggaattgaacaagaacctgtagattagaaagtggaaaataaaatgttagaagatttgaaaaaagaagtctatgaagccaatatgcaattacctaagttaaatttagttacttttacttggggaaatgtttcagggattgatcgtgaaaaaggtctgttcgtcattaagccatcaggtgttccatatgaagaattaactcctgaggatatggtagttgttaacctaaaaggtgaagtggttgaaggtactagaaatccatcttcagatactcctacacatacctatctatataatcattttcaaaagattggtggtatcgttcatacacactcaccttgggctgtttcatttgctgcagctaagatggatattccagctttgaacaccacacatgcagatactttctatactgatgtgccagcagctgatgcattaactaaagaacaaattgaggaagattacgaaggtaatactggtgtcactattgtcaaaacctttaaagagcgtggtctcgattatgaagcaacaccaggtgctttagtttcacaacatggcccatttacttggggtgaaacaccagctaaggctgtttataatgctaaagtcttagaagttgtggcggaagaagactatcatactttgcaattaacacgtgctaattgccatttaccacaatacctacttgataaacactattatcgtaagcatggtaaaaatgcttactatggtcaaaataatgctcattcaaaagatcatgcaaagcgtgcctaaaactaaggggtaaaaaatgcttgaaaattatttttttgattttgataaaactctggctagttcaggtaaggcgtcattgattgcgacaaagcaggcatttaagttaaataatttagatgagccagatgatgatcaaattttagattttatgggtattcctgctgatgtttcattccctaaaatggctaatagagaattgtcagaaagtgatgcgaaaaaattagttgatacctaccgtaatatttatggaaagtatgaaaaagaaaatacacatttatatcctggaatgcgagatgtactagaggatttacagcaaaaaggtaaaaatttatttgttgtatccagtaaaagtcatgatattttaaagagaaatttagataatttgaaaattactcaatattttaaagactttgtgggatgcgatgaggttcagcattataagccagccccagatggtattttgatacttttagacagatacaatttgaataataaacaaagtgtaatggtaggggatgctcgttatgatttgcaaatgggcaaatcagcgtctgttaaaacttgtggagcagcttgggatgcttttagtgtggatagcttaaagaatgaacatcctgattatttgctatttcatgtggcagaattaaaaaatattgaatagagttcatatattttaaaattggatggtatcaattttgaaagtagttgaactctttagcaaaaatgatattattaacttgtaagggaaaacggttacataacgatggtctataggaggacatcatggctgtagattacgattcaaaagaatatttaaagagcgtcgatgcttattggcgtgcagcaaattacttatcagttggtcaacttttcttaatgaaggccccacttcttaaaacacctttagttgctgaagatgttaagccaaagccaattggtcactggggaactattgctccgcaaaactttatttatgctcacttaaacagagtgttaaagaagtatgatctggatatgttctatattgaaggttcaggtcatggtggtcaagtaatggtttctaactcatatctggatggttcatacactgaacgctatccagagatcacccaagatgaaaagggtatggctaaattgtttaagcgcttcagtttcccaggtggtgtggcatcacatgctgctcctgaaactcctggatcaattcatgaaggtggggaattaggttactcactttcacacggtactggtgctatcttagataatcctgacgtcattgctgctgttgaaattggtgatggtgaatcagaaactggtccacttgcagctagttggtttagtaacaagtttattaatccaattaaagatggtgcggtattaccaattttgcaaatcaatgggtttaagatttctaatccaactattgtttctcgtatgagtgacaaagaattaactgaatacttccgcggcatgggctgggatcctcattttgtttcagtctttaaaggcggtcgttttgacggtgaaaaggatccaatgcaggttcacgaagaaatggctaagactatggatgaagtcattgaagaaattaaggctattcaaaagcatgcccgtgaaaacaatgacgctactttgccacattggccaatgattatctttcaatgccctaagggctggactggtccaaagaaggatttggatggcaacccaattgaaaactcattccgggctcaccaaattccaattccagttgcacaagatgatatggaacataaggaaatgcttgaaaaatggcttaagagctacaagccagaagaattattcaatgaagatggttcacctaagaagatcgttactgaaaatacggctaagggtgaccacagaatggccatgaatccagttactaatggtggtaagaaccctaagcgtttgaacttgccagattaccgcaagtacgcattgaagtttaagccaggtcaaatggaagcacaagatatggttgaatgggctaaataccttagcgaagttgctgatcttaacccagacacattccgtggctttggtccggatgaatctaagtcaaaccgtttgtttgcacttcttgatgatcaaaagcgtcaatgggaaccagaaattcatgaacctaatgatgaaaacctagctccaagtggtcgtgtaattgattcacaattgtcagaacaccaagatgaaggattccttgaaggctatgttttgactggccgtcatggcttcttcgctacttacgaagcctttggccgtgtagttgattcaatgcttacccaacacatgaagtggttaagaaaagctaaggaacaatactggcgtcatgactatccatcacttaactttgtcgcaacctcaactgtcttccaacaagaccacaatggttacactcaccaagacccaggcatcttgactcacttatatgaaaagaatcgtccagaccttgttcatgagtacttgccatcagacactaatacgcttttggcagttggcgacaaggctttgaaagacagagaatgcatcaatgttttggtaacttctaagcagcctcgtccacaatggttctcaattgaagaagctactaaattagctgataaaggattgagttacattgactgggcttcaactgatcaaggctataagccagatattgtatttgcttcaactgaaactgaaccaactttggaaagtttagctgcaattgatatcttgcacaagcgtttcccagaccttaagattcgttacataaatgtagtagatgtgatgaaattaatgagtcctaaggataataagaatgctatctctgataaagagtttgatcgcttattcccaagtgacattccagtaatctttgcatggcatggatacaagactatgatggaatcaatctggtttgcaagaaaccatcataatatacatattcactgttacgaagaaaatggtgatattactaccccatttgacatgcgtgtcctgaaccaccttgatcgtttcgacttggctaaggatgctgttgaaagtattccatcattggcaggtaagaatccagacttcatcaatgaaatggatgacttgcttgctaaacaccaccaatacattcgtgataatggtaaagacattcctgaagtcactgagtggaagtggacaggtcttaagtaaaaaataaagtgtctgggaaaaaactaactcttagaccataataataggacgatcaaaattcttaagtgagttttaatcgtccttttttcttttaaaattaaataaaaacggtcttttggtcattttctgttccaatatttgcttatattcatcatcatgaaggctattccaacatcggtttcaactttctttttgcctcttagatgtgtttgccttcttcgctttgaagaacttcttttgctttttcttttaaatactgccagttagggttatagcgtacttgacgctggcgaccgctagctgtcttagctaattgttccagttctgacgtaagcttcaactgcctggcccttcagcttatcatgatacttttcgacagccttgcgccaaacaaaagtgtagcggttagcatcagcttcaattttagtgccatcaataaaaacagccccctcgttgatcagccaacagattggtaaagtagataaagctcttcttaaccagttcattggcatgactgctgtgtggtatactggtcgacctgttttagcagggtgtaaagcagaatagcttctggaatcgaatccacaatccagctgatagcattagccaagtgattgctgggaatggtaaaatccaaattgagtgttaaagctgtttgacctgtgatatgatttttgtacatattagtttccacctttttgttttaatgaaataagaggccacaaatgatcacattttttatggagaaatttaaaatgttaaattttagatcatatgaagacgcagatttcgaaaaattatgcaacatccacgatcaagcgcgaaagcaagaattaaaatttgccaatcttgaagctgcatttattccattcaaaatagcatcaaagaaagagcaattatttgaagactatcaagttcctgaattgtcaaattaagtgcaacagttaggttatgaagagatatattgcttgaagagttcctctgctgtgtgatattggaggattcggcgatatttgtggttaatggcatcagttgcctgttgaacataagcttttgacttgtctttcatgctcttgcccttagggaagaattgacgcaaaagaccattgcagttctcattggtgcccctttcccatggagaatatgggtgagcaaagtaaatctggcagcccttgatcttggtcatatccgcaaactcagagccattgtcaaacgtgattgatttaaaccaggcaggatgtctgtcaatctccttttgaagcagcctttggcatgtgcttgcccgatagtcaggaatcttgataactacttcaaagcgtgtggttctttcagtcaaagtcattaaagcaggctgattcttgcgtctgacgcctttaaccagatctccttcccagtgcagcggagcttttctgtcttcaacctccttaggacgctgttcaatggaattgccaagatgcttcttgtgcaaagcgtgaccgccatggctgtgatgacgcttgttcctgcgtcttttgagcttcataggcagatcaatattgcttatgtccagcaagccctgatcaatatagcgatagacggttggtgtgctgggacaagggtagcctggcatagtccttttgaattcaccaacgaactcatcgatgctggtggcatcaaatttagctttaaagcgtctggagagcattctcaaaaagacagcataatgcttcaatggattgcgctgatagcagtttttgcgacgcttctcataataaatctgtgcagtatcagcgtaatagtgctcatacaataaatagctgctgtctctttgcaggacgcttccgcgtttgatttcgcgactgattgtcgacttatggcagccaacttcttgagcgataacagtacgggaagttatgccggaatccagcattgcttgaatttgtccacgttgtacgctggttaattgatgatagtgcttagaaatgctagaatttgaattggtcatgaagatcttcctttcttgatttttcgtcacttcaagtttaggtcttcatggcctttttgtttaacacttagtgttgcacttcaattttaaatccgggagactatcaagtttacgttgcaacaaaagaaaataaagttgttggttttgtcggatttaacgaagaagagcttggctggctctatgttgatcctaaagttcaaggacaaggtattggtagtaaactgattgattttacgcttgaaaattcgaccaggccattttatttagaagtgcttgagggcaatcctgcacaaaagctttatctcaaaaaaggtttcataacaattaaacatgaaagtggcaagatgccaggtaatgaatcatttagtgttgaagttgacctaatggaatataaataaaacatcccaatcaggtgtgttttttgttagacttataaaaaatgaagctagtcaataaagtattgtcttgtcattagaaagtactacatatgaagtatatttcatgaagtccgcttcatattttagggatgatgattatcaataataaaattaaggaataccgcaaaaaacatcaacttacacaacgcgagttagctgaaaaagttggtgttacagaacggacaataatttcattagaaaagggtcggtacaaaccatcgattgttttagcttataaattagtacaattttttgagacagatattgaaactttattttgcttaaatgagtatgtgaagaatgagcaagccaaaggaaggaatgcttacaattctttttgcgattctatcagtcatacagctcttagaattaatttatgatgttgcaaatagaaaaagcgtcaattatattcaagatgttatttggttaatattgggcatctgtttgacagtcggttatttctatagtactaaatatatcggtatagccaagattgaagaagatgatgaacgcgataaatttattcaaactaaaactaataatcaagcattcaatattttacagtgggtcctttttgttttaggtgcagtaacgataataattgatgttaatctcggccaaatgggattagattctcgtgcaatggttattatagttgtaggcgttgtattaatctttttatgggcattttcttggattttgcaattaatcttaatgataattaattatttttgcaattgagactacaaaaaataaagcgactggattagctccaatgtcattaagttaagacattgacaattaagggtgcttttttagagatcgaatcatttggattcgatctctttttttgtataaaataaaggcgaaaagaccagccttttcgcctatcttatatattatatattttaaaccttcaaaattattgccagaaagatggtgttaattatgaaagcccttcataagaatattctagaacgtcttgatcaaattatcaataatactggggatcatattcacgattttattaataatcctcatgcttttaccaggaaacgcactttagatgcagcgacagtccttaaaactacaattaacatgcaaggtcagaatttaaacagtgaactctttagagcttttggcgaagatgcaactaaaaagaacgataaagtagttagtacttctgcctatgttcaacgcaaaagccagctttctcctgcttgttttaaacatattctgactgtttttaatcaaaatctatttaatattcaactttttgatcatcactaccgtttgtttgccattgatggctctgactttaatcaaatctggaatccgaaatcgaataacattgtacaagcttcttctcataaaaagaaaccctattgtcaaattcacgttaatgccttatatgatctattgaataatacctaccaggattgtatttttcagcctaaatcagaaatggatgaacgcaaagcggctgttcaaatgcttaaagctttgaattgtggtccatatattgtaacaatggatcgtggctacactagtttcaatatgattgaaaactgcaatcgcctgcctaactgtcattacataatacgaactaaggctggacaaggcggagttaaagaaataacgacattgcctgatcaagaatgtgatcgtgagatttcctgcctggtaactacttctaactattactacatcacgcataaagccagtgagaatattcaccatgtccagcatcattatcgccaatatattaagtatcgctctaaaaatacccaggatctaagctgggattttggcgagttatgcacaataaaatttcgagcctgcaaatttagaattaatgatgccaaatcaggcaaagaagaatgggaagttgtgctaaccaatcttgatcgaaaaaattatccgctaaaaagaattaaagagctttatcatctgcgttggggtattgagacctccttcaagaaattgaagtattctttaggcagtgtacagttccattccaaacaagataaatttattgaaatggaaatttatgcccatatgattatgtttaatgcaatcagtcaaattgatgcacaggcctatattccgcaaaagcattgcaagtatcaatatgccatcaatttcaagcaatcatgcttgattattcagagcatgtatttggcttcttctttaacgcaagattttgaacggatccttattcagatcagctattataccattccaattagaccaggccgcaaggacaagagaaatattaagcccaaatcagctgtatattatttatatcgcgtagcttaaaaaagcagaatctgtgctatgccttatttgttgtacgaaaaaagcaccaatttaaccaattaaatgttaaatcagtgctttaaaagtctaatattaattgtcaatgtcttaacttaatgacattggattagctctggtcgcttatttaaattttagtatggcatttctttaaaaaattagaatatcgatctttttcaccgtttaccttccaatattaaccattcaccgaaatttttaaatttaaaatattttttcgtctatactgataagcaagaaaggagaaaaagggatgaaggtaaaatttaacattgataatcaattagcgggagaaagtgctgaattttggttaaaaaagatgactaataaattcagtcaattgggtaaagaattaagtggtgaacaagacacgatttggtgcagttatgatgatgaaattattcctgtgaagtttgaaaatatttatttaattcaagtcgaacaagagcaaactttaatttatgacaaaacacagagttacaggtataaagggcaattatatcaggttaaaaatattttgccacataattttttaatagcgtcaagaagtgcaattattaattatcaaaaaattgatcatttggaagttatggatggtggcaatattgatgtcattatgaagaaccaaatgcgggtacaaatttctagaagaaaaattaaagacttgaaagagaggttagggttatgaaaagaatggaatctttcttggtaagtggaataagtggcatgggaattggattaacttggtattcaatagtaactttatttcaaacgggaacgaattggaaaaatgctcaaattccgtttacaagtttgctcttttatttgattgtctcttttgtgatgggagcatttttcaatttgacaggattgatttttgaacaaacgcaatggtcactacgaaaacaaattattgtaaacttttttgttagctatgttgccttttttgcttttgaattagtgattaatgatttggctttatcggttcatttcttcttagtaattactggagtatttgtcttgatgtacttgctcgcttatggtttgtactttttacaattattgcgagatgttaaacaaatcaatcaaaaattgaaagaaaagtaaataatcaaaaacgatcaagcctaaaaatcttgatcgttttttcgttggttagataaaaattacgcgtggtgctagttaaatcgttttagttaataaaaaagtccaatcttgttagactcaacttgtataataatagaaaagagcctgatctgattgaactgccttaagcttaagcgttttagccaccatttacaagttagttttaaagatttagtgataatttgtcggcactggtatcgtttgtatgcaccggctgagtttactcatcggcgaaatattgatcaaattaaaactacggacagtctgattttggctttacttatctggcaagctaagacaggaattgaatcacaaagaagattctgtgaatgtttcaattgtttatcacactcacgttttaatcgacgttcacgtcagctattgcaattgatttatcagatacggcaagaaatgaataaaaaggttgacctgaatggacatttcttgatcattgacagctttccggtacctgtttgccaaccaattcgcaactatcgtgctaaaatttttcgcggttatgccaacattggttataaggccaccaagaaaatttacttctatggtttcaaagttcatgccattgttagcgatgacggttacattcttgattatgtcgtaacaaaagcatcagttcatgatgccaaggagacagttgaactgctggaaaatgcccatccatctaattactatcttcttggcgacgaaggctatttaggcaaagaactgcatcaacagctaaaacaaatgggttatgaactttggacaccatatcgtaaaaatatgacaggagctaaaaagcacaatgatcatcaattgatggctattcgcagaacaattgaaagcgacttttcgcttctgacctattacaatgccgagaacaatcgagcacgtagtctgataggctttcaaagccggttggaaattgcaattttagcttataatttggcttattgtctagaaagatttaactagcaccacgcgtaaaaattataaactgtcttgaatattatcagctaagtagtcataaagcataccatgctttaattgcttagtatcaactcccaaagcttcagcaattgcataggcaaaggcccaagcggtagcaggaccacggcttgttaaaattttatgctctttatcagtaacggtgattttctctgaaaaatgagcacttggggcatcttttaagcattcttcttcaatgcctggataacaagtgaagtccgcatctgccaaaacaccatagcgagcaagagcacgtggagcagcacacattgcggcatcccacttgccagcttcatgacgcttaatcatcagatcacgtaatttttcattatcgcgtaagttagcagaaccagtcatgcctcctggaaaagcaaccaaatcataatctaataaactgtcatctacaactttgtcacaagtgatttcaatatgatggtcaccatctacttttttacttattaaacctaccatatcgcattcaacgttaagtctacgcaatacgtcaacaacgcttaaaccttcgacttcttcgcaaccgtctgcaaatactacagcaacttttgtcataaaatcatcctttctataactattttaattatctacttacattagatctaagtaaaatgaaagatctgctaatttgcttaaatgaagagtaggatgaggtgaaattggtatcttgtcttttttaggtgccagccataatgattttagattggcattttctgcaccttgaatttcttcatccagattagttccaattactaaaactgtgtctggatcaatatctggattgtctttcagaatcttaaagaaaatatttttgcttggcagcttgtccgtaaaatcatcggcgaaataagcattgtcaaatgaagaaagcaattctgtaggtgcaaggcgcggttcgatttgagtgcgcttttctttagcaagcaaaatcaaatgcagcttgccactgacttcatcaataaagtcgatggcgcccttgactaacctggtttgatccttcattgcatcatcaaaaacagttcgcgttttagaaagatcttcttttaaaaatgtagataaagctaaatcgatttgatcattgctagataaatttttaaattctttttctaagctagtgtagcgtagtcgctcagctggtccccagtctaccccataatgttttaaagtttgccgcagcgcagttttttctgctaatttttcatttaataaactgccttcgggaataaaaattaaagtttcaaatgtagccatgaataaacttcctttgtgttagttcctattagaattataatgaactagacaattttaggaaaggaattaaaaaatgacaatctggaccgtaattttcttattattaggtggtgttgcaggtggcttattatcgtcagtggcctcaatggcatcacttgcatcatacccagttttgctagcagtaggaattccaccagtatttgctaatgtaactaatgatgcggcgctaatttggactagcatcggttcaactgtatcttctactaaggagttaaaaggacattggaagcaagttttgttctataccatttttacagttgtgggatcaattttgggttgtattttgcttctatcttttcctccaaagatttttgaaaaagcagtaccattctttattgctttctcaggattgatgattattgtttctggtaaacaccatagtttaaatactaagacacagcctacttggcttaaaataatttattttctcgcacttttagtcatggggatgtatacaggttactttggtgcagctggtggagtcatcgtactagtacttttaacttacattaccaatgataaatttattgttattaacgctatcaaaaatgtgatttgtggttttgctaatttagtagccttgattatatttatgtttacctctcatatttatgggcttcaggcaattcctttggcaatcgggatgttcattggtggctatattgggccagctattttaagacgagtaccggaaaagccagttcgaattttcattgcaagcttggccttcattcaagccggttacttcttttatacggcatatctgcaataagtttggtacaatattaagcaatgaaaagggggctaaggttgatggcaacagaagtttatttggtacgtcatggtgaaacaatgtttaaccaattggacaaagttcagggttggtgcgattctcctctaaccgtgaaggggattaacgatctaaagagaaccgctaaggccttgagtcaagttcactttgataacatgtattcatcggatttgaagagagcaattgataccgttcacttgatgaaggatgctaatgtggtctcggatattggtaaaattaaaaagctgcctgaatttcgtgaggtcttctttggaacttttgaaggcgatgatattaaccagacttgggaacaagtagcactagccgcaggaattgaccatgaagatgatgtaactaagatcatcaatcaggtaggcttgcgcaaatttcgtgcagcaacaaaaaaggctgatccgcgtcatttagcggaaaatcaggatgagttagatgagcggatggtacgggcaattgacgttttgcgcgatttaactaaagatgaacaaagagttttgttagttagccatggtgactttattaaaactttgtccataaaatattggaataagagtaatggcaaaaacgatattgtttttccaaataatgggagcgttactcgtggaattttgcacgatgacggttcatttgaaattgttgattataatgtagatgctgaagagctataaaagtcctactgccgaagtagggccttttttggtacactgataacgaaaggaaaatattttatgaataaagatcatacaactaagcgttatgtcttcgtaactctactgaatgttgttattactattgctgaatttataggtggtattttttcaggttcattagcactgctttcagatgcatttcataatctgagtgatgttggtgcaattattttatcttttgtggcgcacctgattagtcgcaaaagtcgtaatcagtttaagacctttggttatgaaagagctgaaactttagccgcttttactaatggcgttatcttgatcgtgatcagtgtggttttgtttgttgaagcaattcaacgtttctggaagccggaacatattcacggtggcattatgctgattgtctcgattattgggctggctgccaatattatttcaatgctagcaatgcatagcgattccaaggctaatttgaatgtacggtcaacttttattcatatgttaagtgatgccttgtccagtgtagcggttgtaattggtgcgatcttcatttacttctggaatgtaacttggcttgacccagttttgactattttagtttcaatctttgttttgcatgaagcttatgaaaatacaatgaaagcagccaatgttttgatggaatctaatcctgatatcgacttgaatgaagtgaacaagattgttttatcgttccccatagttcaaaatatccatcatgtccatgtttggcgctacagcgatgactttattatgatggacgcgcatattaatgtagccccaggattaagagccgatgaattagagcagctataccaagatattggacaggagttacaaaaagagttaggtattaatcatattaccttacaagcagagtgcgagcgtggcagaaaagacaagatgatcgttccaggccacggtattaacgaagattaggtgaaagaatgtttaatgttaatatttttacagcgattattgtattgattatgggtatttatgacatgtcctatgcttttaataggcgtaagcaacctaccaataaaggcggcattagagcctttatggctttaggaattatcttcacgatcgcaggaattgttatgatcgttagagtattaatgaagtaaggaatcttagaatggctaaattagtattagttcgacatggcgaaagtgtggcaaatgctgccaatgtttatactggctggaacgatgttccgttgactaaaaaaggtgaagaacaagcagaaaaagctggtgaattgattaaaaccatttcggattttgctcccacccacattcatacttcagtcttatcccgtgcaattgtgacagcaaatatagtagccgatgtctgcaatttattatggctaccgatgactaagacctggcggctgaatgaacgccactacggcgctttaaggggccttaataaggacatttcacgtaaagtatttggtgtggaacaagttctattgtggcgacgtagttttgattcagttccacctaagcaggggtcgccaatgattgatcgccgttataagcattttgatcagcatttgatgccacgggcagaaagtttacatcaaactcagaaaagactcatgccatattattatgatcatatcgcatctcgattgatgaatggtgaagaccaactgatcgtagcccacggttcaagtttgcgtgctttgataaaaaagctagagcagattaatgatcatgacatcgtaaaactggaagttcctaatgcggaaccgattgtttatactatggatgatcacttaaagattattaacaaacaaattttacgtaaataatgttaaaaatgcaccttagtgcatttttttaatgctctaaatgaggttttacacatatctatggtaaaatctattatgatttctagtatatttagtttggagtattaggcatgcgtaaattatttttattacgaggtgcacctggctccggtaaatcttcttttattactcgccatcacttaaatccttatgcgatcagtcgtgatcaaattaggctactattggcggatttgacagtttactatcaagaggatgcggatgttttacaccaagtcattccgcggcacgtaactgtgcgtactgagcaaatggtggatcaccttgtagaacacaagatggaatatggggaaactgttattgtggatgggacgcatatcgttccaagtgcgattgaacattttaagccttgggtagacaagtatcactatgaatgctttgtagtagatctgatgcaacatactaccttagagagtttgcttaagcgtaatcagactagaatgcattacgattgggttaagcctgaagtggttaagcaaatgtatcgttcttatgaagcacatccagaagtaccatactgggcacataaagttgtgccaaatcagatggatcatgcgttgtcacagcgtgagacaaatttagatcgttatgctcatgtgattgcggttcctgacatggtagatgaagaagattttccacatgtgcatatctcgaacttttatttttcatttaatgacaagtttacagaaaagtatggaacttatcgaaatgtagtttcaattgctaaaactgaagatgaagcagttaagcagttcaagttgccatattttgtctttaagtttcatcacaagcactttttgatttcagcttatccaattcgaaatgagatgttggatccgatcagaaaggttaagggagtttggacatattcaactggtttgtataatgtagcggattttgtgaaagaatttccggaaaataaaaagcaacatgtgcatcagttcaacttaagtaagttagatccaacccgcttattacatatttggtaaaaaagacgtagttagaacattttatctaactacgtcttttgtgtaatttacttatattttgttttacttcaatttgccggccttagctaaaacttctttagccttttcaagtgaatggtgttcttcacgataacgcttgatgtcatagccatcaacatcggttaacttgctaagtctatcatcaaggtctttgaattctttttcaagatccttaatgacgccttcttcatcttcaacgtaaacatactcattttcatcagctttggcatcaatcttagcatcgtattcgccgacttttctagcatgtttcaaaatagatttaatatccttaatcgtttcatgttgtgcagtacggtgacgacgatcaggtactgaatcttcaattctagcgaagtggctttcagcatcactaattttctttgaaattctatctaatgcttttaattgtctttttgaatagtctgtcatgcttttttcatcctacgtaaactttaccatttgaatcctctctaccgaattcgccttcgttgtaggcctaatatttttgggatacaagaaaggacacttgaagttgtaaaaaaagtgtcagaaatttctttccgacacttaactatttgattatagctattaatacttaaatgctaaggcacccattggatcccatggcaataattgaattgggttatctttgccttcatcgtaagccttcttaagatcttctggtaagaatttcttgttgataactgcttggtaaacaaatgaattaaaccaagaatcactcattacgaagtaacccttaaagccaggtttttcaccccatgagttttcgatcttccatttagttggcttaccgtcaacgatatcaacaccggtaatcaccatggcatggtccatcatgctttcaccagaatcaagcatgtcggctttagacatagtgaagtcagcatcaaataattgatcacggcggtaaaggttagtatcaagaagtccagcacggcgttcagaatccttaactacgtttgaaccgaaccaaacaacttcgccactcttcaattgtttaatgattaagtccttcatttcatcaactttaaggtttaagtggcgaacttggcgaccgccttcaacgttacctaagtattcaactgagaataccttgtggaaaggtttgtcgttagttggagcattgatagttgagatatggtttgctaaatccatgccaacgtacttgtcaaagaattcctttggggtaatgtccctgtcaatatggtaattcttgtcatcatcgcggtattcgaagttgaacttctttggtggaacacccaatgaagtagccaaaatacggaagacatcgtttagcatttcttccttgcgagcttgtacttcatcttctgacttgccatcttgaactaatttacgtaactcaagaccatctttacgaagcaaagtatttaaagtgtcgtttaatgcacttgaattagtagcattagcagtttctggataaacactcttaggaacgataccatatttttcaataataccgcaaagcatgtcccattgaccgccgtcttgttgaggagtcgcaaataagaatgaaactttacgatcgcccaagtccttatcagcagttgcgatcacattttcaaagaaccagttagacttttcaaatttatcccagaagttagtgtaattttgagataattcgaagtcctttaacttaaatttcttttgtaatgggtgacgcatagtgtttaaagcactgaacatccagcagcgaccagactgcttttgatcggcagggttacctgtatcaatttcgattgagaaggttggatctaggtcgatcttagtttgtaagttttgactagctttgtagataccgttttcttgagcagcgtgactagccacatcaaaaacagggtggttagctaagtcttgttcaaatttattaatagtatcattgttgatttcttttaccataaaaaaaatcctcctttataagtacttaaattaattttatcttattcaaaatgagtcgtctaataatcttatcgattaaatggacgatgataccaaattttgtgaaattgaggatgctgggtgaagtagtcaatgatcataggatcaagcggccaaatgggtaagttagtttcttgagctaattgccaaactttttgcatttgtttttcaagcaaatccttactattaaattgtggattaataaaaaaatggttcattatccagacattactgtctttgcgagcgattttatctaaggtaacgctagataatagtatgtcttcttcattttttatagtgaaaatttggtgcgcatcttgcttattcataaaaaattcctttttaaaaaaataatctcatttttttgcgtaataaataatagagagctatttattttgtgttgactaaaaacattgtaaaatagataactgtcaaaataaaagataaatggagctttggaatgaaaacacgtggatttgaagtagtcaaaaagtatcaagatcaggaaattaatcttcctcgcagacagaccctagctagtgcaggctatgacatcgaagcggctgaagacattactatccctagcatttggcgactaaattttgtgcgaatttttaggttgattagaaatggacaccagctgtatgagcgcgactatgagatggcggatcagattttaaagccgttgttagtgccaactggacttaaagcttatatgccagaagatgaagtgttgattttagctaatcgttcatctaatacttttaagcgtaatctagctttgccaaatgggatcggcgttatcgatgcagattattacaataatcctaacaatgagggcgaaatttttgtacaaatgattaattatggcgtacggcccttgcacatcaagaagggagaccgtattgctcaaggcatttttatcaaatacttgaagaccgacgatgatgatccaattagtcgaaaaagagttagcggctttggatcaactaatgaaaagaagggtgattaatggctagagtaaaaacacaatataagtgtcgttcttgcggctatatttcggcaagctatttaggccgctgccctaactgtggtgcttggaatcaatttgaaaaagaaactgaagaagtgcaaaagcgttctactaaggcaactgctagtcgtttgattcagaagactggattaaatgaaccggtaaagctggataagattaaagctgaaaaagaagaacgaattgtcactaaatctgaggaattaaaccgcgttttaggtggtggtattgtgccaggctcactagttttaattggtggagatcccggaattggtaagtcaaccttgatgttacaaattatgagtgacttatctgaaaaatataaggtgctttacgtttcgggagaagaatcagctaaccaaatcaaattgcgggctgaccgactgggtgtaggtcaaagtaatatgctcttatatccagagactgacatgcatgatattcgcgaacaaatcaatgatgttaagcctgactttgttgtaatcgactccattcaaactatgaatgaaccaagtcttgattcgatgactggctctgcctcacaggttcgtgaagtaacaagtgaattaatgaaaattgccaagatggatgccattacagtttttgttatcggccacgttacaaaagagggtgcgattgctgggcctaagatcttggaacatatggtggataccgttctctattttgaaggggatgaacaccattcttaccgaattttgcattctgttaaaaaccgttttggagcagcaaacgaaattggaatgtttgaaatggttaatgaaggcttaagagaggtaactaatccatcatcaatttttctggaccaaagattacctaattctactggctctgctgtggtggtatcgcttgaaggaactaggccacttttagcagaaattcaggctttggttactccgacagcttttggctatgctaaaaggaccacgtcaggtattagttttaacaaagcttcattgctgctagcggtgcttgaaaagcggggaaacttaatgttgcagaatcaagatgtctatttgactgcaactggtgggattaaattgaatgaaccagcaattgatttagcaattgccatggcagttgcatccagttataccgataaagaaatttcgccgacagattgttttgtaggcgaagtgggcttaactggtgaagttcgccgagttgataaaatcgatgcacgagtaaaagaagcggctaaagtagggtttaagcggatctttattccacggcataatatgtattctggattaaaagatcatggcattgaggtaattcccgtttcgagtattccccaagctttaaaattagtttttggctagcattaattgaattcttactatataacgagtaaactaagattgtttgaatttactattttttgaaagaggcatgaattttggctaaagaaaaaatccgtgtaagatatgcaccaagtccaactggtcacttgcacattggtaacgcacgtactgcactttttaactatttattcgctcgtcataacaagggtacgatggtcttgagaattgaagacaccgaccaaaagcgtaatgttaagggcggttctaagtctcaaatggaaaaccttcactggttaggaattgactgggatgaaggtcctgataagggtggcgactatggtccttatcgtcaatcagaaagaaaagaaatttaccaaaagtatattgatcaattgatcgatgaaggtaaagcatattactcatacaagactgaggaagaacttgaagcacaacgtgaagaacaacgtgctgcaggtgttgcacctcactatacttacgaatatgagggtatgactgctgatgaaattaagcaagctcaagatgaagcaaaggctaagggcttaaagccagttgttcgtatccacattccagaaatggaaacttattcatgggatgatattgttaagggacaccttgagtttgaatcagacactattggtggggatttcgttattcaaaagcgtgacggaatgccaacttacaactttgccgtagttatcgatgaccacttgatgaagatcactcacgtacttcgtggtgatgatcacgtttctaacacacctaagcaattagttgtttatgaggcacttggttgggaacctcctaagtttggtcatatgacattgatcattaattcagaaactggtaaaaaactttctaagcgtgacgaatcagttcttcaatttattgaacaatatcgtgatcttggttacttaccagaagctatgtttaacttcattactcttcttggttggtcaccaaagggtgaaaacgaaatctttaacaagcgtgaattcatcaagcaatttgaccctgcacgtttgtctaagtcacctgctgcttttgaccaaaagaaacttgaatggattaacaaccaatacatcaagaaggctgatcgcgacactttgcttgatttagctttgaacaacttgcaagaagcaagtcttgttgatgagcatccaacaccagaaaagatggaatgggttcgtcaattggttaacatctactcagtacaaatgtcatacactaagcaaattgtagacatggctaagattttctttgaagaagctaaggatctttcagacgaagaaatcgaagaaatcaagaatgatgatggccgtggtgtaattgaagaattcaagaagcaattagacctcatcccaagatttacttcagttcaaatcatgaacgctattcaagcaactcgtaaggctactggcatcaagggaagaaagctctttatgccaattagaattgctaccacgcgttcaatggttggacctggtattggcgaagcaatggagcttttaggtaaagaacgtgtattagaacacattgatttaaccttgaagcaaatgagtgctaataatctttaattagataaattgaaaaagaggctgcaaataaatgcagcttcttttttcatctgctaaaataaaaattagttattttgacagaagggacaagtgttagccgtgagagtttataatacactgacgcgtaaaaaagaagaatttaagccattagttccaggacatatcagcatgtatgtctgtggaccaacggtgtataactatattcacattggtaatgccagaagcgcaattgcttttgacaccattagacgctattttgaatataagggttatgacgttaagtatgtttctaactttactgatgttgatgacaagatgatcaacgaagcgagagctgaaaaaacgactgtacccaaattggctgaaaattttatcaatgcttttttggctgatacgacagcgctaaacattgagccggcgactttgcatccccgtgcaactcatgaaattaatgacattatcacttttgttaaaagcctaattgacaatggctatgcttatgaagtagacggcgatgtttattatcgtgccaaaaagtttaagcattacggtcagttaagtgatcaaaatattgaacagcttgaagagggtgcttcagagcacattaacgatacagaacaaagccgcaaagaagatccaatcgattttgctttgtggaaggcgcaaaaggaacccgatgaaattgcttgggattcaccatggggcaagggacggccaggctggcatattgaatgttctgtcatgagtaccaaatatttaggcgatacgatcgatattcatggtggtggtcaagaccttgaatttccgcaccatgagaatgaaattgcacaaagtgaagctaagaccgggaaaaagtttgttaattattggctgcataacggttttgtaactgtcggtaaagatcaggaaaagatgtctaaatcactgcacaatttcgtaacagtgcacgatattttaagggaagttgatccgcaagtactgcgcttcttcatggctagcgtacaatatcgccgccaaattaactattctgctgaaaatttagcacaagcagctacaattttagatcgctttaaaaatactttgactaatattaattaccgtctagaagatgatacagctagtgaagaatcagccgaattagcacaggcgattatggcaactaacgaaaaatttgaacaggcgatggacgatgactttaatgtccaaaatgctttaacagctatctatgatttgttgcctgtagttaatgccaacgctaatgctgctagagctgacaagcaagaattgcaaaagtttaaagagaaattagctagttggttattagtgtttggcgtggatactaataagctttgcgttaaaaatgctggctccaatgacgatgaaattgacgctttagttaaaaagcgtgatgaggctcgagcaaataaagattgggcaactagtgatcaaattcgtgatcaattaaaggaaatggggatcactattcaagataccccacaaggaactaggtggactcgtgactaaaataaaaaaactaacggaagaggatgttaatccggatactttaaatggacaaactttagcctatttaggggatgcagtgtatgaattaattattcgcagacacctagttaaaggcggtatcgttaaaccacaagtattgcagcgtgaagcgactcactatgtttcagctaaagcacaagctgcgttggtaactaagatgcaagatgaagaaatgttaacggatgatgaattagctgcttttcgtcgtggacgtaatgctaaaagtcatactaaggctaagaatactagtttgaaaacataccaattatcaacaggctttgaagcaatgattggttatcttgatttactggggaaaaatgatcgagtggcagacttaagcaagtggtgtattgatactgtagaagaggacgggctgaaaaattatgacttcaaataaagattttgtctttggacgccatgctggacttgattatttaaaaacacaaagtgccgacaagattaataaggtttttttacaacacggtgtacaagaagaatttgctaatcaagtttatagtttagctaaaaaaaagcgtttagttgttcaagacgtgcctaaaaataagcttgatcgtttggttgctggtggcaatcatcaaggtctagttttagcaatttctagctttgaatatgcagatttaaatcaattgctggacaagtatgatgcggaaggtaaagaaccatttttattaatgttggattctattgaagaccctcacaatctgggatcaattttgcgttcagccgatgctactggcgttgacgggatcattattcctaagcgtcacgcgactggcttaacttcggtagtagctaaaacatctacaggagcaattgattatgtgccagtagcgcgcgttaataatttagttcaaactactaaagaactgaagaaacgcggttactgggtctttggaactgatatggcaggtactgattatcgtgaatggaatgcccaaggcaagactgtactcgtaattggtaacgaaggtaaaggcatcgccccattacttaaaaagcagatggatcaaactattactttgccaatggttggtcacgtacaatccttaaatgctagtgtggcaaccggggtattgctttatcaagcttataacagtagaaatccattagtaaaataaacagaaagtagacaaaagtgtgagttttgtctacttttttagatacataaagctcatttctgtccattaaacatgtgttttcttctcaaactcaggggatagtctgtattctttgaggtggaggataaattgaatgattaatgaagagaagctgattaagaaagtacgggcaggagatgaccaagctttagaaaaattgtttcatttatatgagccgttagtaaattcaatcgtgaagcaattctatttgcatcattatgatcgtaaagactgggatcaagaggcaatgattgtttgttatgaagcagcactagttttctcgcctaaaaaggggaaatttagcagtttatataaaactaaattgtttaatcatgcacggaccttggtacgttacaatatggcacgtcgcaggcaaatctatagtcaatcgattccgctagaaaaggcggacattcaaggaagcgtgaatgaaccatgccgctctgaattatcgattccagttgatgagacttacaataattttgttaatagcttgtcacacgttgaattaattgcattattaaccataattggcgagataagtacagagtatgcgattgatcatctaaatattgaagcaatgaagctggtcagagctcgagcacgaactttacagaaaatgcggaaagtgcttttttgatagctgatcaaaagaaagtgcggtataataagtaatgtagaatattttaggaggtaatttaagatggcagacgaaattattaagactgcattgttagaccgtcacatgaaggaagcttttgactggagtgattcagatatgccagttagagatgccctttgggactactttatggaaaagaatggtagagataccatgaagacggaagaagatatgcttccatttttgaaagactcagacgataaaatcgaagccttcgttaacgaaaatcttaagaagtaaatccgactaaaaaacaatgttctacgcaccgtggtcacgcatagttttgaccactaagacagctaccttctccggtggctgtttttttatactaaaattaagaaagaattttaaagatgaaatatataattggcatagacataggaactactgcgactaaaggtgtgttgtatggcgaagatggaagtgaagtagctaaattggcaatttcctatccattgattcaggaagaagcgggacaggctgaagaagatccacagcttatttttgacgcggtacagaaaatgatttatcaattaagtcagaaagcatctggtcaaattttggcaatttcttggtctagtcagatgcacagcttaattggcttaggtgaaaataatgagttactgacaaacagcattacttgggcagataatcgtagtagtgatgtagtgcagcgggcaaaaaagtcgggctgggcaagaatgatttatcagcaaacggggatgccgccacatccgatggcgccagtgtataaattgctgtggcttaaagaagaacagccaacactttttgcacaagtaaaaaaatggattagtatcaaagaatatattatttggggcttaactggaaaaatattaactgatacaactatggctgctggcagtggaatgatgaatttaaaaacgctgacctgggatgaaaagatattggctcagattgggctagatcaagttcaattgccgacaattgctgatcaacaatctactgtgggtaaaattattccagaatatcgtgctaaattgggtttaaatgatgaaactcaaatcgttttgggcgcaagcgatgggtatttgtcaacgattggtgtcggcgttttggatgagaaagattttgcattgaatgttggcacttctggtgcggttagagtaattgcaccgaaggcaattgttgatcaaaagaatcgctttttctgttaccctgttgacgccaaacattatttgcttggcggccctgtaaataatggtggaattgtgttcgattgggccagaaaaacaatttttggcccagatgaaacggcagaggacgtcttaaatgtggcacaaactgctccggctggaagtaatggattgttgtttcatccttatcttggtggtgaacgagctccaatttggaatgctcaagcacgtggatcttttgttggcttgacgcgaaatcacactaaaccgcagatggctagaagtgttttggagggaattgtttttaacttgcttggcgcctctcaaggattgcttgatcaagtgggacagcctcaagctttacgtgttactggtggctttgtgcaaagtgattttgttagacaattaatcgcggacatttttaacttaccagtgattgtaattaaaaatgagcagtgtggtaccctagcagctatgtttttagctaaaactgcattagaagataagccagacctggaaaagattaaaaagcgtactgccgaaagccaagtttattttccaaatccccaaaatgtagcgatttatcaagaattgattctcgtttatcgaaaaattgagcatgaacttgaagcctcttatgaagatttggctcagtttcaagataagcatccacagaaatttgagtaaaacaaaaaagacgcattgcgtctttttttcatagattgattaactattaagcattttcaatatcttcaacaatctgatcaactgtcatacgattgtctttcaaaatttctttcaaaggtacttgatcagtatagacacgtttttggccgtagttgagtactttaatatccttgtcgccaaggtaggaagctactttttcaccaaaaccgccgtccaaaatattgtcttcaatagtaacaataactttgttttcttgagtcaatttgtctaaagcggcagtgtctaaaatattagcagaaactggatttactaagctagcacctgtcttttcagccacctttttacctagcatatcgtacatatcacctaacgctaaaacagcaacatctttacctggtttaatgtcgtacttgatttctgaatagtcaacagcagtaatttctttaccttcaggaacatctttggtaggcatcttaattgctacaggatgcttcttttgcttaatagcccattccatcattgccttttcttcggctaagttagttggagcaaggtagatccagttaggcaagttagaaatcattacttgatcaaacacacctaggtgagtcttacttgtgccagaaatgccaccaccagcaaccatcattacaactggtaaatcattagcggcaacatcgtgtgataattgatcaaatgcacgttgcaagaaggttgaattttcaaataaaactggagttgcaccttccttagccattccggcagcgaaggcaacggattcttgttcagcaattcctacatcatggtagttttcaggatatttgtttttaattctgtctaagccgaaaacgccgggaattgcggcattgatagccatgatcttctcaccattattgatgtgatcttcaagaacatcgagtgcaatagagctagcggtcggaccttcaggcattgctactgtcgtcttgtcagtctttaaatcgaatggcattacccagtggtgtgcttcttcgttgtcgattgcaggttgataacctttgcccttgagagtgttgatatgaagcaaaatagggtgatcaacatttttaactgctttaaaagcatcgatcattgattggatatcattaccatctgcgacataacggtaatcaaagcctattgcagtaaatggattttctttggtttcaccattagaatcacgtagtttctttaaagcagtaactaagccaccgacgttatcatcaattgacatttgattgtcgtttaccactacaactaagttatgcttttcaattgcagcgttgtttagcccttcataagcaaggccaccggtcattgaaccatcaccaattaaggccatgatgttttcatgtttgcccattaaatcgcgtgctttagccatcccagttgctaaggcaattgaggtagatgtgtgaccgacggcgtaatagtcatatgggctttcatcagggttgctatatggagttacatcttcatagtggtctggatcaagccaagcgagtgcacgtccagttaacattttgtgcgggtaagtttggtgggaaacatcccagacaatcttgtcctttggtgcatcaaaaacatagtgataagcaattgtagcttcaacgattcctaagtcgggacctaggtgaccaccttcagcggcatctttttctaagattagagtcctaatttcactggctaacttttccatttctggaagagataatttttttaaatcagcaggaccagaaattttattcaatagatattcaggatgtttatttattattatgtcctttctaacaagtagttacacttattatagataagcaaaaatcaaaataaaaatatttagttgtaattgagctcgattacttttagtaatgtaaatcagattattgacgtaggaagggacaacagtataaaatactgagtaagtatgtgtttttataaaagtttggaagtgagattatggcagtgaaaaaagcagccttagcctgcagtgtttgtgggtcacgcaactactcaatcaccgcaagtaagaatcgcactcagcgacttgaacttcaaaagttttgcaaacattgcggtaagaaaacattgcataaggaaacgaggtaaataaagctaatgattaagttttttaagagtgttggtcatgaaatgaaattggttaaatggccatccgcaaagcaaaatagacgtgatacagcaactgttattactagttcaattttatttgcggcatatttaggtgcacttgactggctcttcacttggttgactcaaagattaatgtaattgctagcataattagaaattatcagcgattcatgctataatattgacagctaaaagaaaacctctgtgggaggtttttttgtttacctaaaatttaaggagaaaaatatggtcgaaacaacacaaaagaaatggtacgttttgcatacttattcaggctatgaagacaaggttaagtcagacttgttgtcacgtgcacaaagcatggggatgcaagactacattttccgtgtaatggttccagaagaagaaaaagtagaaaccgttcgcggcaagaaacaagaaattgaagaaaagattttcccaggatatgttttagttgaaatggtaatgactgatgaaagttggttcatcgttagaaacacacctaatgtaactgggttcgttggctcacacggtggtggctctaagccatcaccacttcttgatgaagaagtaacgcgtttgcttaagaatcaaggtcaacctgctaagaaaccagtagttaactttgatattggcgaatcagtaactattactgaaggtgcatttaatggcatggtaggtaagattactgatattcaaccagataagtacaaattatacgtatcagttgacatgtttggtcgtgcgactactgctgaacttgattatgatcaagttaagaagcttgacgaaaacgaataatatttagaatttttagttgtaattgtacccaaacgatgttattctaatacggtacgtttattattgtgggaggagaaaaaaggaaaattctccattttaaccgcatcacggaatcaaggaggttttgaccgtggcaaagaaagttattaacgtagttaagttacaaatcccagctggcgctgctaccccagcacctccagttggtcctgcattgggtcaagctggtattaacattgttggttttactaaggacttcaatgctagaaccgctgaccaaaagggcatgattatccctgtagttattactgtatatgaagatcgttcattcgaattcattactaagactccaccagcaccagttcttttaaagcaagctgctaagatccaaaaggcttctggtgaacctaataccaagaaggttggtaaggtaaccaaggaccaagttaaggaaattgccgagactaagatgaaagaccttaacgctgctgatattgaagctgctatgcgcatggttgaaggtaccgctagaagtatgggtatcgaagtcgaagactaatcctgttatttaggtaacaaattaggtgggagagttaagagaagctcgtttgaccacatatacaaggaggaaatcacatgccaaagcatggtaagaaatatttagatgctgccaagaaggtagactcaaataaattatactcagtagcagaagctatgaaacttgttaaggaaacttcatacgcaaactttgatgctactgttgatgtagcttacaacttaagcgtagatcctaagcaagctgaccaacaaattcgtggttctatcgttttaccaaatggtaccggtaagacccaaaccgttgtagtatttgctgaaggcccacaagctgatcaagctaaggctgcaggtgctgactttgttggctcagatgacttggtagaaaagatccaaggcggctggttagactttgacgttgtagtagctactccaatgatgatggctaaggtaggtcgtttaggtcgtattcttggacctaagggcttaatgcctaaccctaagactggtactgttaccatggatatcgaaaaggctgttaagaatgttaaggctggtcaagttgaataccgtgttgaccgccaagcagctattcacactcctattggtaaggtatcattcactgaagaccaattagttgaaaactttgacgcattacgcgacgttatcttacgtgctcgtccagcttcagctaagggtcaatacattaagagtgttgctgtttcagcaacctttggcccagggatcaagcttgatccattaaacttggactaatttaaaatagactattaaaagcctcgctattgcgaggcttttttctattcattgacctattattttcgaacatggtatcataaattgaacttacaaatctatatattaaggataatgtcatgaaaaagcattctattggaaaactagtcattatgttggtgctaatgctagcttttgttacgggctgtgctaataatggttctaaaatcactattgttggttcaagtgcaatgcagcttttagcagaacaagcaggtaatgattatcgcttaagtcatcaagacagcaacattgtcgtgcagggtggaggatcaggtacaggattgagccaggttcaagctggtgcagtccagattggaacctctgatgtttttgccgaaacacaaaagggaattgatgccaagaaacttcgtgattataaaattgcagtagttggtattgttccaattgttaataagggtgtaggtgtgaaaaatgtttcgcaaaagcaattgaaacagatcttcactggtaaattaacgaattggaagcaactaggtggcaaaaatgaagccataactgtgatcaatcgttctaagggaagtggtactagatctgctttcgaagatataattttacaaggaacaaaaccagttaagtcgcaagaacaggactctaacggtgccgttaaaaagattgttaattcaacgcctggtacgattagttacttgtcctttccttatgctcatgataccaatattcaaaagttgagtattaatggggtaaagccaactaacaaaaatattactactaataagtggaatatttggtgttatgagcacatgtacactaagggtaagcccaacaaacaaactaaagcgtttattaattatatgttaggtgaaaaagtacaaaaagatcttgtacctaagattgggtacctcagtatcaatgaaatgaaagtaactcgtaatagcaagaatcaagttacacaaataggaaaatagttcatggataagaaggataaattaaaggaagttgttgatcaagcaattgctagtcaacacgttccacacgttaaattaaaaaagatgggtccgactagtgttgatattgataaattaaccaagccatctaaagagactcatcaagaatattggggcaagggtttaacttacttggcaattgttttgattattgtcttagttgtctcaattatcggctttgtcggctatcacggcttggctacttttgtcagcgatcatgttaatgtcattcactttttgacttcaactgattgggacccgggtgagggcaagaatcatgttggtgctgcggtaatgatcgttacttcgttcttagtaactcttttagcagcattggtagccaccccgtttgcaattgcaatagctctttatatgactgaatattcatctaaaaagggtgccaatttcttacagtcagtgactgaattattagttggaattccgtctgtagtttatggtttcttgggattaactatcatcgtgcctgtgattagaaaactatttggtggaacaggttttggtattttagcagctacgttggtgttgttcgttatggttttaccaacaatcacatcattaacggttgatagcttaaaggctgtaccaagtcattttagaaaagcttcaatggccttaggttctacgcattggcagactatttatcatgttgttttgcgagttgctacgcctagaattttgacggcggtaatcttcggaatggcaagggccttcggtgaagctttagccgtacaaatggttatcggtaatgccgtcttgatgccatacaatttggtcagtccatcagcaacattaactagccaattaactagtcaaatgggaaatacggtcatgggaactttgccaaacaatgcattatggtcattagcattattgcttttaattatgtctttggtatttaatttcctagttaagttaattggaaagaagggacaaaagtaatatggatgcaaaaaagaaagataaattagctacggcgattatctatattttggtaggaattgttgtattaattttggccggtatcctaggtgatatcttgattacaggtattccacatttgtcctggcgctttttgagttctgaagcctcatcataccaagctggtggtggggtacgtgatcaacttttcaattcaatttatttgttaattttgactactattatctccttaccaattgctttaggagcagcaatttatctagcagaatatgctaaagataattgggtgaccaatttgattagaactacaattcaaattcttagttcattaccatcaattgtagttggcttattgggttatttattgtttgtagttcaatttggctttggtttttcaattatttctggtgctttagctttgaccttttttaatttgccaattttaactagcaatattgaagaagcaatcaagggcgtcccacaagatcaacgtgaagcaggattggctttaggattatctaattggaaaactattcgcgggattgttttacccgctgctcttcccggaattttaactggaattattttgagtgcgggccgaatcttcggggaagctgccgctttgatctatacagcgggacaaagtggatcaacagtcaattatgcggactggaatccatttagtccaactagtccacttaatgtaatgcggccagccgaaacattggcggtccacatttggaaagtaaatactgaaggaattattcctgatgccacgattgtttcagcagctacttcagcgctcttggttattgtggtaatcgtatttaatttaggtgcacgttatttaggcaataaattgtaccgcaagttaactgcagctaagtaggtgaaataatgcaagatttaaaacctagctatattaaaacttttgcaaatgatgatttggaattatcaactgaagatttaagtgttctttatggcggtaaggtacaaaaattatttgatgccagtcttcaatttaaaaagaacacgattacagctttgatcggtgcttcgggttcaggtaaatcaacatttttacgttcattaaatcgaatgaatgatcgagtagcaactgttaacggaaaaatctggtttcatggtttagatgtgaataagcctaatatcaatgtttatgaattaagaaaaaacattggcatggtttttcagcggcctaatccatttcctaaatcaattagagaaaatattgtttatgctttgaaggcagatggacataaggatcgggcagaacttgatcgagttgtagaagaaagtttgcgtgcggctgctttatgggatgaagttaaagataagctggataaaagtgcattagcattgtcgggtggtcaacaacagcgtttatgcattgctcgtgctttagctgttaagccagaaattttactactggacgaacctgccagcgctttggatcctgtttctacttctaaactggaagatacccttaagcagttgaggagtaagtatactatgattatggtaactcacaacatgcagcaagcctcaagaattagtgattatactgcattcttccatttaggacatgcaattgaatataattcaacggcagagatctttactaatcctaagggtaagattactgaaaactatattcagggaagttttggataaaatgacaacaataatttcagcaaaagatgtacatctaagttatggcaattatgaagcactgcacgggatcagtcttgattttaagaaaaaagaattaacagctttgatcggtccaagtggttgtggtaaatctacttttttacgctgtcttaatcgaatgaacgatgacatcgaaaacattaatatcacaggtgaaatcaagtttgaaggccaagatatctataattctaaaatggatttggtcagtctacgtaaagaagtcggcatggtttttcaacagccaaccccattcccgttttccgtatatgacaatgtggcttatggcttaaaaattgctggtgttaaagacaaagagctaattgatcagcgggtagaagagagtcttaagcaagctgctatttggaaagaaacaaaggacaatttaactagaaacgctcaagcattttcaggaggacagcagcaaagaatttgtattgctcgtgcgttggctgttagacctaaagttgttttattagatgagcccacaagtgcgcttgacccaatttcaagtagtgagattgaagagacactgatggaactaaagcatcagtatacttttattatggtgactcacaatttgcagcaagcaggacgaatttctgatcagaccgcctttttgatgaatggcgatttgattgaagctggtccaactgaagaaatgtttattgcacctaagaaacaaatcacaagtgattatcttaacggtcgttttggttaaaattttgaggtaaaaagatgcacgaaatatttttggatgaactgaaaaaattaaatacacaatttatggaaatgggtgtcctcgtcaacgatgatattgaccatgctacccgtgcttttgttgatcatgataaaaagactgcgcagtcaatggttgatgatgaagaaaagattcctacagaatcaattaatattcaaaagcaagccttaaaattaatggccttgcagcaaccggtagctactgattttagagttgttatcagtattttaaaggccactactgacttggagcgaattggtgaaaatgctatgagtattgctctggaaacaatcagagtaaaaggtaatcctcgtattccagaagttgaagaaattatttctaatatgacacataatgtgcgacatatgttaattcaagttttaactgcttacgtgcaagatgatgaaaaaatggcacgtgaagtggctagtcgtgatagcatgattgaccacgactatgtaagagctcgtcaattgatcgttgatggaattgaagatgatccttcgcgtgcaatggcttcatcaagctattttgtagttacccgtttacttgaacgaatcggtgaccacattgttaacttggctagctgggtggtttataaaactacgggtgaactagaagaactatctaattcaactgaaagtgaaacgatttaaataaagtaccgtaaaaagcggtgctttttttgtaataaaaaacagttgatacgcgtggtgctagttaaatcgttctagacaatatgccatattataagctaaaatagctatttctagccgctgttgaaagcctactggacttcttgctcgattattctcagcgttgtaataactaagcaaagaaaagtcgctttcaatgctttttctaattgccatcatcgcttactattgcgtggaccttgaagccataataatagactttcttggttgctttataaccaatatcagctacgccccgaaagatcttgacacgataattgcaaacaggctggcaaactggcactgggaaactatcaataatcaaaaattctccagctgtctttacttcttgattccaagcctgacggatacaacgaattagaggcaagagcattcgagctcgacggttaaaacgagaatgagataagccaacgaagaatttacagaatcttcgttgagattcaattccaatttcagtttgccaaatgagcatcgctaagatagaactatcaggaagcttggtctgatcaacatttttacgatgtttaagtccatcaggcgcataaagcttatatagcgagcgacaaatcacatttaaccgattaaaactaacttgtaaatggtgagaaaaacgcttaagcttgagatagttcaattagatcagactcttttctatttaaattacctacaacttttattaactaaaacgatttaactagcaccacgcgtataattaatgaatatttcaaaaactgtattggcgttataccaaacaattattggtgaaaaacagaaacgcttaatcaagacagtagatgcttatttggacattaactacggtgataaagtttatcagataattgatcaagttaaggaacgtaatattccaattttgtcttttggggatatagcagatcaaaacaatacttactcaaactacactgtttttggcaatgatcaagttgacgagatggtggataaaattaatgaaatcatcaataaccaaaataaataaaattatcttttgcattttacagcaaagcttgctataataattaactgtaaattctacctaagactcgggtggcatgacgcctcaaaatcccgccgaggccagaagatgatgaagatttttatgctccatgtctttcggcatggagtttttgcttttttaaggccttatagaatttatcaatgtgatcatggaggtgaaataatttgagtaaagctgctattgctgaaaaagaaaagttcgttgatgcatttgctgaagaacttaaagctgctaaggcaatcttggtaattaactaccttggtttgactgttgaagaagttactaacatgcgtaaggaacttcgtgataacgatgttaagatgaaggttatcaagaacacctacttaagacgtgctgctgctaaggctggtatcgaaggtcttgatgatacttttgttggaccaactgctgttatctacactgataacgctgatgacgttactgaacctgcacgtatcgtttctaagtacgaagatgactttgacgttatcgaaattaagggtggtatgcttgaaggtaagttgacttctaaggatgaaatcaaggaacttgctgctatcccaggccgcgaaggtttgctttcaatgcttgtttctgtattacaagctcctgtacgcgactttgcatatgctgttaaggctgttgctgaatctaaggatgaagactcagctgaataataaagaaatttatatttaatatctaaattctaatttttcggaggatacttaaatggctttagatactgataagattattgaagaattgaagggtgctaccatccttgaattgaacgaccttgtaaaggctattgaagacgaatttgacgttactgctgctgctccagttgctgctgcaggtgctgcagacgcaggtgctgctaagtcagaattcgacgttgaattgactgaagcaggtcaagaaaaggttaaggttattaaggcagttcgtgacattactggtcttggccttaaggactcaaaggaccttgttgatggtgctcctaagaacgttaaggaaggcgtttcagaagacgaagctaacgacatcaaggctaagcttgaagaagttggtgctactgtaacccttaaatagttacagcccaactgggcaactatgaataagctctttgctatgtgcgaagagcttatttttttgtataattaaatttatgatgaaagatatagaaagaagactaacgccatatcaatgggtaatggccattttagctattatttcgatttttttgattattttagattttgctgcggttattaatattgatgaaccgactagtaaatggttctggatcaatagtgcaattgtagtatattttgcaattgattattttcgtggcttacatgcagcagaagacaagaaactatatttcaaaactcacatttatgacttgctgagtattattccaatggggttattgtttatcagcttaaatatttttaatttatctgggctggtatcagatttgcggcatttgcgtttgattcgattagctggtttgatgggaaaattacgtaatatttttcatactaatggcctactctatgtaatcttttttacaattacatttttgttggtaggagcggaagcattcgcaatcactgaacatgtaacgctggatactgctttttggtgggtcatttcaacagcttctactgtcggttatgatgcaatttttggcaaaacaattccaccgcatagtattgtaggaaaattcgttacattagtaatgatgcttttaggaattggaatagttggtatgttaacgtcatcgattacttcgtatttgatgaggagaacgaatggcgcgaatacgttaaaaacgcatgataatattcaattaattttgaaaaagcttgataatttagaaaagcaaaacaaggatttggctgatcaaaacaaaaagatgcaagcacagattaatgaattgaaagatgtacagaatacaacggagctgcataagataaaagaatggtttgagaaaaagaaaggttagttaaaatgagtgaagaaaaaaatcaaatgtattttgcgactgatcctactgccaagcatgatcaacatgttgttgattatcatgtggataatattgatttgaaattcacaacagacgcaggtgtcttttctaaaatgagggttgattatggctcaggcgtattgatcaaggcaatgaaagatgttgtttttcctaaggataatatcttggatgttggtaccggttatggtccgattggtttatttgcggctaagttttggcctgatcaaactgtagatatggttgatgtaaatgagcgtggattaagcttggcaaagcagaatgcacaagttaatcacatagataatgtaaatatctattcctctgattgttatgaacatgtggataatgataaaaagtttggtctaatattaacaaatccgcctattagagcaggaaaaaaagtggttaatgagattttactgggagcaaatgagcatttggttaatggcggtatcttattagtagttattcagaaaaagcagggagaacctagtgcgcgtaagctgatgaccaatacatatggtaattgtgaaattttaacaagagataaaggctattatatcttaaaatcaactaagaaataactaaataaaaaatgcttgaaagtactattaaataagcattagactttataaaagtgctttcaaaactggatttatcctcgtataataatcttgtaaatatcaagagtatgtgaagaggataattattatgaaaaaggcttggaaatacattgttgcagtattgattgtaattgttggtgtgtttatgttaggtatgatttccggtgataacgagactgctgctccagctggaattgctgcattatacttgatcttgtcaggaatctttttctaccacaactttagaaatcgtaacattgaaccattgtaaaaagtaagcagctagtcgcaaatagctgcttttttgatacaataaataaaaacgatgaattgagaagtgataaaatgctgtctggcgaagataaaaggaaatacatgcaattagccattgaccaggcaaaagaagctgaaaagcaaggagaggtgccgataggggcagttgttgttgatcctgatggccgcgtaattggtactggatataacaggcgtgaacttgatgaagatgctacccaacatgcagaaatgattgcgattaaagaagcttgcagtaagttaggcatgtggcgcttaattgactgcagcttattcgtgactttggaaccatgcccgatgtgtgcaggggcaattattaattctagaataaaagacgtttatttcggtgcacttgatccaaaagccggagcttgtggatcagttgtggatttatttagcgtagaaaaatttaatcatcatccgcatgcaattcgtggactgtatcgtgatcaatgtgcacaaatgctaaaagattttttcagagcgattcgtgagaaacaaaaagcagctaaattagctcaaaaagaagtataaaatcagtaatttttaaaacaagatgctggtaatatttactgaaatacgttaacatagttgttgggcaatgtttgacctctgaattgtgtcaggaccggaaggtagcagcactaaggttgttcaggcatgtgccttttttgttagaatattaacagctcttagctcttcgagagctaggagcttttttacttaggaaagagaatttatggcttatcaagcgctatatcgtaagtggcggccgcggacttttgacagtgtgattggtcaagaagcgattaccgataccttaaaaaatgcgattaaacgtggtaaggtttcccatgcgtttcttttcgcaggaccccgcggaactggtaaaacatcttgtgctaagatttttgctaaggcattgaattgtactaatttgcaagatggcgaaccatgcaatgagtgtgctaactgtattgcagctgatcaaggttcaatgccagatatcatggaaattgatgccgcttcaaataatggggttgatgaaattcgtgaaattcgcgataaggtaaaatatgctccaacggaaggtaaatacaaggtatatatcatcgacgaagttcatatgttgtcgatgggagcttttaatgctttgctgaagacattagaagagccaccagagcatgtagtatttattttagcaacgactgaattgcaaaaagtgcctgcgacaattatttctagaacgcagcgctataattttaagcgaatttccaaagaagaccttgagaagagaatgaaatacattcttgatcaagaaaatattaaatatgaagataaagctttagcagtcattgctcaagtagccgatggtgggatgcgggatgctcttagcattttggatcaactgttgagttacgagaaggaaagcgtcaactatgatgatgctttgcagattacaggctttgcagatcgagaaaatattgaaaaaattcttttagctttgttaaatcaggatgcaggtcaagccttgcagtttacacaagatgagttggctaaaggagctagttcaaaaaacattttagatgaaatcatcgatctaactactaagagtttattaatcgtcaaaaccgatgaaaataaacaggaaacttttttaacaaaagactttattgaaaaaataaagagcgtttctacagatagttattatcgattgattaatttggctaataatgccttgaatgatttacgctatactaatcagcaacagataccactggaagtgttcttagtagaagcaagtagtactgcaccagtgcagacaagcgctgccccagctaagacaacaccagctcaacctgcacaaggtaatactgatttgcaggctgaactagcagcgctgaagaagcaagtcgttgatttaacacaaaaacttagtgaagtatccaataagccaagtttatcaacaaatcaggtatttcacttggatactgcggtacctaaagtggctcctaagcctgctgttaaaccaaaagagaagcaaactaaaaagccggttagaaaagtcaaaaaaactacggcagaaaatcgcaaacaagtatatcatgttcttgaaaatgctactcgaaacgatttagagacaattaagaatgtctggcctgatttacaatctgttttagctgtctctgaaaaagcactgcttgatgtattagaaccagtggctgctagtcctaaacaagttgtcatgaaatgcaaatatactttatggtttgaaaatgcgagcgcagataatgatctgttagggcgcttaacagactatattgaaaagtttgctaaacattcttacggcattgttttggtgccagataacgattggctggcagttagaaaagaatttgttgaaagccataaggatgagctacttgctaagaaaaagcaacagattgagattcaagaaaaaaagtcagatgaaccagaagttgatccagaagtgattaataaggcaaaggatctttttggggatgcagtcaatattaaagactaaagtactatgagcaatgattataatattaaagttttaaataaagaaacaacattacagatcttactagaagatcataattctttgattcgttttggagatggagaattagatttaattagaggagcaagtattccgtatcaagattatcaaccggaattagctggttcgctaaaagagctcctgttagaaggcagcaatcgccgtttattagtaggattatctgatgtttttgaaaagttagatcgctataatgattattgccgtaatttttatcaaaatagtttcttcccgaataatcatgacttgttaagagaagttgaattgcaatacaatgtatacgtttctactttcttttcacggccatatattgatttagtagataaaagtcacgctaaagattattttgctaaaatgaaacagctttggcaggatcatgatcttttaattgtagaaggtaaatatagtcgctcaggcgaaggcatgacttgttttctaatgctagatcaattagtagactcatttgtccgccaactaatgcatatagtcgcaaaaaagttattgaagatgaaattattaaaaatgcagctaataggttgattttactgatgttaggtcctactgcaaaagtgattgtggctgatttgatagctcagcttaataatcaaatgattgatatagggcacatcgattcagaatatgaatggatgaaaatgggcgtaactaataaggtgaagataccgcataagcatactgctgagtttaattttgatgataaacaagttaaactagagaaagacgacaattttgataagcagattattagtataatagaataataaaggagaaaaattatgagtagaagacctaattttggtggtatgggcatgggcggcatgaacatgcaacaaatgatgaagcaagctaagaagttgcaagcacaaatggcagaagagcaggaaaacattactgctcaagaatttactggtaagtctgccgatgatttagtagtagctacctttactggtgaccgcaagttgaaggacatcaagattgataaggaagcaattgatccagacgacccagatatgttacaagatttggtaattgatgcggttaacaagggcttgaccaaaattgatgaggcaactcaggcaagcttaggtaaatacacgaaaggtttgatgtaattgcaatatccattaccaattgctcatttaattgatgcttatatgaagctacctggaatcggtgaaaaaacggcgactcggttggctttttatacgatggatatgcctgatcaggatgtcgatgattttgctaagtctttagttcaagtaaaaaaagacattcatcaatgtccgatctgtggcaatattaccgaaaaagatgtctgtgatatttgctctaatcctaatcgcgatcaaacaactattatggtagttgaacaaccaaaggatttgatggcttttgaggaaatgggcgaatatgacggactttatcacgtgcttcatggtgttctttcaccaatggatggaattggaccagaagagatcaatatcaagtctttaattacgcgtttgcaaaaaaatgatgctgttaaagaagtgattttggcgcttaattcaactccagaaggcgaatcaactgcgatgtatatcagcaaattaattaagccagctggtattaaggtaaccagattggccgctggtttgtcagttggtagtgacattgaatatgctaattccattactttaaagcgcgcagtgcaaggaagaacggcattataatggctaataaaaagcaagcaaagatcaaagcaatgggtgatcaaaagttggtagccgagattgaaaagctacaaaatcaaattgcattagagcaagatctcgatcaaacaactttagatttatccgaagataattatgtgcaaaatcgaatcttaaaggcaaagtatacttttttgtataatgaagctcgtcatcgaggcacaagatttagtggtattactaatgctattacccagtagaaaaagaccgaatattggtctttttttattttgaataaataaaaaatagtaggactgttaatctctatgaaacttctgtagaatagacatatggaggattttatgagaggttattttgttagttttgaaggccctgatggcgccgggaaaagtacagttttaaaagaagtattgaaccaaattggttcagagcttaagacacaatatcttgtgacgcgtgaaccaggcggttcaaaaattgcagaaaaaattcgcgacattattttagatcctgctaacgacaagatggacaataagaccgaagcgcttttatatgctgcatcacgtagtcagcatgtggaggagattattcgtccagctttaaaggaaggcaaagtcgtattttcagatcgctatgtcgatagttctttagcttatcaaggagcgggacgtgatttaggaattcaggaagttaagcaaattaatgattttgcaacggataaattagatcctgatcttacttttttcttagatcttgatcctgaagtagggttaaaacgaattgaaaagctgcgtccgggtcaggaagatcgtttggaacaagagaatcttgcctttcataaaaaggtttatgccggttttctcaaggtaaaagagacgtatcctgaacgcttcgtaactgttgatgctacgcagccaattgatcaggtagttgctcaagttattgcaacattaaagcaaagaatgccagagttattttaaggattgatttagatgaagttagtaattgcaattgtgcaaaaagaagactctaatgatttacaacgggcctttgttcaaaatgattttcgtgctactaagttagcaacttcaggtggttttttaagtcaaggaaatactacctttttagtaggttgtgatgacgataaagtagacgatgtattaaagattattaaggaacagtcccgagcaagagaggaaattgcaacaccacatatggtttcaactgggtatgaaattacacagcctttgaaagtgacagtcggtggtgcaacttgttttgttgttccagttgatgagtttaaacgcttctgatgattgatcttagtaatgttgggaaaaagcaaacccaatttttaaaaagagcatatgaccaaaaaaagttagctcatagttatctttttgttgatagcgatgaggcacgggcattgaatactgcatactggctagcttgtttgtttaattgtactggtgaaaataagccggatggcagctgtcaaaattgtcggcaaattttgtcaggtaaccacccagatgtattgctagtagcgcctgatggaaaacaggctctagggattgatcaaattcgtcccttaaaagaagaattagccaaaagcccagttgaaagtactcgccgtttcttctttattaatgaagcacaaaagttaactttagctgcagcaaacggtttattaaacttactagaagaaccagtagcgccagtagttacgattttgattactaacaatagtgatcagattttaccaacggtgcgttcacggacccagatcattaattttgacaatggtgagagggctagtggtaggactgcagtcttactggagaatggtttttcaaaagcagagattgaggaactgggtaatcttgataaatggaatcaggcaattaaatatttttatcaagaaatgctggaacacaacagcttagcacttgtcagtgcacataagctagctgctgatgctaagctagtgtcagagcagggttacatcttgcttcagttaaaattattggccgagcaagatttgcgtaatcctgctaaaagaataatggcggcgacaatgcttaagaatttaattgaaatagacaaaatgcgtttgagtaacgtaaatttacaaaatgcgttagattatctcgccttaaaatggaagtaggtgtttagattggatccatattcaaaactgaaaaagattgaagaaacaacagaaaatatgaccaagacgattgccagcttggaaaatgatattttagaaacattaaaagaaaacacggagttgaaggtagaaaatcaattactccatgagaagctggacaagttaacggcaaatcagcctgcacctgagactaaaacgcagagtggcttggaatcattgaagaagatttatgattcagggtaccacatttgcaatatgtactatggctcgcatcgtgatccaagtgcagattgtatgttttgtcttgatattttggacaattttggcgaaaaaaagggcaagaaaaaggacggtagataatgaaacgtcaaagcagttatgcaaaagatgaaggaaagctttatttagtgccaactccgattggtaacttggaagatattactattcgcgctaaaaaagttttaaccgatgcagattatgtagccgcagaagatacaagaactagtgggattttactggaaaaaattggggttcataataaaatgatctcttttcataagtataattccaaggagcgggcgccggaattgatcaagttgatgaaggaaggtgctgtgattgccgagattagtgacgcggggatgcccgtgatttctgacccaggttatgtattagtacaagaatgcattaagcatgatattccggttgtaccacttcctggtccaaatgctttttcaactgctttgattgcttccggttttaatcagccatttacttattatggctttttaccaagaaaatcatcggaacagaagacctattttgcacagatgcgcgataatagagcaacatcaattttttatgaagccccgcatcgtctagcaaaaaacctcaaaacattggctagtgtgctgccaaaagatcgtcaaattgtagctgcacgtgaactgaccaaaatccacgaagagtttatccggggtagtgtggaagaagttacgaattacttcaatgagaatgctccacgcggggaatttgtgattctagtttcacctaatacagaagcgcctcagcaactatcttggacagaattaattgacttagttaatgacttggttgaaaaaggtgaatccaagaaagatgcaattaaacaggtagccaagcagcatcatgtttctaagaatgaattgtatgatcaatatcaccaggattaattatgaagtataccgaagaatatcaaattgaatttaaagattgtgacgaaaatcggcgtttaaaattaccagcactagttgagttaatgatgcaggtttctgagcatcaattaagtcaaggtggtgctgggactgatgacttggttaagcgtggtctaggctgggtcgttactcaatatcattttgagattaaagacctgcctaaaccgggtgatcaagttattctaagtactgaagctagcggctataatcgtttttttgagtatcgtgattttggcgttagtacgcaagacggtaagccattagtgactgtaaaaagccagtgggtaatgctcgacttgaagaagcggcatatggtgccaaccgatactaaaatgatggaagattggggtgcaccactacttaaaaagatgccacgttttccaagattgcgtccgcaaaccgaatacgagcaaaagcgttcataccgtgcgcgttacgatgacttagatactaatcatcatgtaactaatagtcattatttcagttggtttgttgatatgttggatcgtaactttttaaaagaacatattgttacagcaattgatattaaatttgataaagaagttcattatggtgagagtataaattcttgcatggacttggttcaatatgatattattattacatctcatgcaattgaagcagaagatgggacagttaaggccgtctgtgaattaagttggcgtgagatatagtaacaacatgacgctattagttgtttttatttaggggaggaatcggtcaaatgaatacaaagaaaattttacgaacggatttacagcaactagtctttttaggtattgttgttgcaatgaaaattattctaagtcagttttcttttggtccagtaatggttaaagtgggactgggtttcattgggagtgtgctattaggatatctctttggtccgctctggggaacaattggcggtggaattagtgatttaatttcatctgcactttttggcgatcaaggtggctttttcattggttttactttaacagcaatggcaggcccatttatctacgccctgtttttatataataagccagttaaaatttggcggattattgcttctactattctggtgactgtaattgtcaatattggcatgaataccttatggctacatattatgtatggtatcaatttcaatgcggctttgatccaacgtttacctaaggagatgatcgttccttggattcaaatggttatcagctactttgttttacaagccgtttctcgtgttaaaataaaaaagtgatttaaagcgaaaagagaaaaatgtataaaatgaaaattttaagtgtttcgacagctactaatcatttgagcgtggccttgaatgatggtcaacaaattattgttgagaaaaatgaacgagatgagcgtaatcatagcgaacatcttgatccttggattgatgaaatcttaaaagataatgatttaagcttaaaagatattgatcgttttgcagttgctattgggccaggttcttatactggactaagaattggaatcactactgttaagatgtttgccagcattttagataaagaggttgtaggaatctcaactttacaagctttggctaaaggcgttcaagaagacgctttggtaattactggtttagatgcaagaaatgacaattattttgcggccggttatttaagcggtgctgtaccagagaatgtcattccagacggtcattacaatatcgacgttttaattaaggcgattcaagattatgcggccaagcatgaagttaagaaaattgtttttgtgggctcaggtcttgaaaagcaagatgaaaaatttaaagctttgaatattccatatgtttatggaactgaagaagagaatgtcatccatgctgggctaattggacaattagctgaaaatgcggttccagttgatccagataaattattgccacgttacttgcgtcgaactcaggctgaagtagactggcataaaaagacaggcaaaccattcgagccagatagtcattatgttgaagaagtttaatcaatttttccatcaacagttaaatcggattgatatgagttttaccccgtttattgcgaatgtaaacggtaagagactacaaattatgcaagctacagatgacaatattcctgacctgcttgtattagaggagcaagtttattcaggtcggacaccgtggaataagttttcatttgagcgagaactagagaagcggcataattgtctttatttggtagtgtattatgaatcgatgctagttgcatttattggtgcgcgttttactccagaagagacgcatattactaatattgcagtagcgccggcttttcaaaatatgcatattggtcgttacttaatgcaattgattattgatcgggcgcgtgaaaatgacagtgattgcgttagtctagaggtaagagtagataatgagattgcccaaaagctatatcgttccttaggttttgaaggtaccttcattcgtaaaaactattaccatgatactcataccgatgctatgaacatggttttatggttaaaaccacatcagattaaaagaaagaagtttacgttttgagtgaaaaaaatgttcgcattttagcttatgagagttcttgtgatgaaacttccactgctgtcattaaaaatgggcgtgagattgaaagcttaatcgtagcaacgcagattaagagtcatcaacgctttggtggtgtagtccctgaagttgctagtcgtcatcatattgaagtggttagtcagattactaaagaagctttggctgaagctaattgtacttggaaagatatcgatgcaattgctgtgacttatggccctggcttagttggtgctcttttaattggtgtaagtgcagctaaggctgcttcaatggcaacgggtattcctttgattggtgttgatcatattatggggcacattatggcagctcaactaaaagatgagattgaatatccagctcttgcattacaggtttcaggtggacatactgaaatagttttacttaaggatcctgttcattttgaaattatcggtgatacgcgcgatgatgctactggcgaagcatacgataagattggtcgtgttcttggggtaaactatccagcaggtaaaactatcgatgcctgggctcatgaaggcaaggatacctttaacttcccacgagcaatgatggaagatgatgactatgacttctcattctcaggtttaaagtcagcttttattaacacttgtcatcatgctgatcagattcatgaaaagttgaataagtatgatctggctgcaagttttcaagcagcagtaattgatgttttggctcataaaacaattcgcgcaattaagcaatataagcccaagacctttatcatgggtggtggggtagctgccaaccatggcttacgtgatcgcatgagtgcagaaattgctaagttgcctaaagcagaccaacctaaggtgattttgccagatattaagttgtgtggtgataatgctgcaatgattggggctgctgcgtataatctttataataatggtcaatttgcggatttgactttgaatgctgatccatcacttgaattgccatatgctaagagcatgttgaattaaatagaataactttttaaatcaaatacctagaacgattatttctaggtatttttttctactaaggcatggtccttaggatcttttaaatctaaggcgattgattcgtaagcgtcaaataaaatagtgtacttaaaaaccgtcccagttactgttatactgagacggttatttaagttcttttatttacaatttatctggatcttctcttgccacggtaaataagcttcaagggtttccgaatccagaatctcttcattcggtaatttctgaagcaaataattcaagtacttttcaggatcaaggccatttctcttggcagtttcaattaagcttagaataaagccacttgcagtagcaccctcaaaactttgagaaaataaccaattcttccggcccatgacgagtgattttacagcgcgttcagccttattgttagataattctaaattgccatcaagcaagacatgctcaaaagtagcttgatgcttgagggtataattaatggctcttcccaatttagagcctggcaaaacggtgattttatttttctcacaccagttgaagaactcttgcatcagaggcttgagctttgcttgtcttagctggtaacgttcttgtttgctcaaattctcccaggtttgttctaagtaaaacatgcgattgcagtagttgagtcctttttgggcaagggacttttcagaagcctgttgtggtacggcttcgtgaaactttcttctaacatgagcccagcagccaactaaagttgctttcggcaattgctcataagcctgccacatatcacagtgcaaataaccgggatagtttcctaaaaagtttaaggcaaccttgcaactccgggaaggatcatgatgatagagtgtaatcccgtattgatcatgtttgcctgaaaggaagacccaatagtaagtcttgattgttttactttctaagactgtataataagtttcatcggcatgtaaaattggccgcattaacagcttttgcttaagcagatcatacactggtttaaagtagtattgactgcttttcaaatcccaataatttaacatctgtcttgaaacttctagtcccatcttcttccagtcgctttcttgacgatagtccggcaccttcatttcatatttttgataaagtgaatgagcgatgagtgaagctgaacctagaccatggtttaggggagctttaggtactgcagctttaatgatcttgtcgctaagatttctttgactgcaatatttacatttgtaagcatgttggatatggtctaaccttttaagttgagctgggataaacaataattcttggcgaactgactgcttgcctatctcaatcagttcatgatgacaatcaggacaatgcttgtcgcctaattcatggtgaacctcttcagctggaagggcagctagtaagtcagcacgctttcgtttgtgagcttgtcttttataagtaatagtctgaacggcggcgtcggggacgttctccgtcatcttgagcatcaggttcatcaaagagacttgtttgtccatttaaaggcatttgttctgaagatttgccataacgtttttgcgttaagtaagctacttgttcacggaggagcttaatttcatcagttaagttttgaatagtagttgcttgttgtgcaataatcttttccaaattttcttgtgacatgagttaaacttcctcctaaatttattagttaaaagaatatcaaaaaagcgtgcgatgtcaagtgttagtagaattcgcacgctttcgtgttctttatttttggattgattgcgaagcccttcattagccagtcgacctgctcagaagataaagcttgaacttcattttgattcctgggccagttcaattttccattttcaaatcttttgtagagcagccaaaaaccttgtccgtcccaataaagggctttgaagcggtccttgcttccgccgcaaaagaggaagactttgccgctaaaaggatcaagttcaaactgttctttgactaaagttgctagtccatcaatgcctttacgcagatccgtcttgccgcaaacgatatagacttgccctaagtcactgagcttaatcatggcaagactttctcaagcagcttattcataatttcagggtctaagctgctgtaaaaattcagctctaagtcattcttctttaaactaagcaacagattattgcgtggtggacgagccttcttaggtttagaagaacggccaagtgccacaatgggttgttgtttttcgatcatattcttaacctccattaaattgatgagattagaatacctgaaaaatacggactaaaaaagatactcggttatatgacgcttacattgattccttgcctgcgttacaaattctaaagtattcgctagaaccatctgcgatatatggccccatgtgacgcgtgtcatcgcctgtttttctttcgatatgaattacccgggcaccactatctgcgagcattctggtacaagtagggcctgagaggacgtgggtaaagtcaataacgagcatcccgcttaaaggataaggtttgtttttatctaaatgactgttttttgcttctagctcagcataattaggttctgtcatagttgtgcgctttctattttaaaaagaaaaagctgttcgaagtgaacagctttttgatgagaataaattaattattcacccttgataacttcagtacgtggattcttaggaccttgagccttagaaattacgccttcttcagtcaatttttcgatttgatctggatcataaccaagtgaagctaaaatttccttgttgttttcaccaagatctggagcacgcttgtagttagaaagtgagaatggcaaaccaatagtcttgaacttaccacggttaccaccttggtcgatggttacgatagtaccatccttgttcaagtccgggccattttcaatttcgtgccagtcaagaactggacctacaggaataccagcagcaccaagcttcttagttaattcatacttgtcgtattgcttagtgtagctttcaattaatgggtaaatttcttccttgtgtaattgacggttgtgccagccatcaaagcgaggattagtttcccaacctttagccttgtaagtccgaccgataacttggccaccttcagtgttctcagcacgaggaattgccttgccccatttccagttagggtaaacagcgtagtgaggaagggcacctaagttgtctaacatgatttggttacgcaacttgatacggcagaggttcaatacagcgtcttgcattgactggtaaacaaaaataccttcactggtgtgttcacgttgaagaagggcagctaagataccaatagtaaggtgcatccctgggtttgagtcacctaaagtagcagctgattgagtaggaacgttggctttgccttcgttccaaccagtagcagaagcagcaccaccagcagattgagcaactggttcaaaggccttaacgttttcaaaacgtgaatcttcattgaagcccttcaatgatgcatagatcaatcttgggttcaaagcgtgaagcttttcccaaccaaaaccgttacgatcagctgaacctggtgcaatgttttcaacaaagacatcagccttcttagccaagtcgtacataatctttttaccttcatcagtcttgatgttcaaagtcaaagacttcttgttggcgttcaattgcaagtagtaaagactccatgaatcttgaatatcaagtaattcatttctagtagggtccccagtgttagtacgttcaatcttaataacttcagcaccaagccatgctaaaagttgagtacatgatggaccttattgaacttgtgtccagtcaacaactttaataccttttaaaggtgcatattcattttcttcagtcgtgattaattgtccttatcttcaagttgtgctaaatctaattctgggtttaagttaccaatgtgaccagattccttacccattgattcaggaatttgagcatcaataattgaaggattacctgattcgtaggccttttcaagagcatccttcatttcagcgtagttacttacacggtagctgtcaccaccaaaggccttagcgatttcagcatagtgagcattgtggcttaaaacagtaggtcctaattggtctttaactgggttacggtcaccattgtagataccaccattgttaatgatgacaacggtaacaggtaagtggtaacggcagataatttccatttccattccgtccaaaccaaaggctgagtcaccatgaagtgagatgactttcttaccagtttcaacagctgcagcaatggcataacctaggccgacacccattacgccccaagtaccagtatcaagacggtgacgaggcttttgcataccgattaagttacgaccaatgtccaaagtgttggcaccctcacttacgatgtaagtgtcagggtgcttttgcatcaagttattgataggttcaattgcactgtagaagcctaaagttggcttagcttcagaatcagcgattcttttagcaaatttttcattgttagcttcacaggcattcttaattgaatctagccagtcttgaggggccttaacgttagctttttcaaggggtgcgtttaatttttgtaaaacagaagtaatgtcaccttgtaatggggcatcgatctttctgtttgaatcaaattctgttgcgtcaatatcgacttgaacaaacttagcgtcttcattaaacaatggagcctcaccatttgaaagcatccaattaagccgagcaccgattaataagactacatcggcttgacctaaagtaaatgaacgagctgaagcagctgatgatggtgagtcatctggtacaacgcctttagccattgacatcggcaaaaatggaataccagtcttagtaactaattctctgacttctgcttcacttctagcataagctgagcccttacctaggataatagcagggtgtttagcgttctttaataattcaacagcacggtcaattgcatcatctgatggcaattgctttggagctggatcgactacttcatagatatgagcgtctgacttttgtgcaactgtgtcggcaactgttgcagcaggaaggtcaaggtaaacaccaccaggccgaccgctcatagcagttctaacggcacgagcaactgctaagcccatgtcttcagcacggtcaacacgataagctgctttacataaaggtttagcaacattgtattgatcaagtccttcatagtctccacggtcgaggtcgatgatatgacgatctgatgaacctgagatcataatcattgggaagcaattcttagtggcttctgctaaagcagttaaaccatttaagaaaccaggagcagaaactgttaaggctacaccaggcttgccggtaagaaaaccagcagcagcggctgcgtctacagctgcatcttctcttctaaattcataaaacttcataccctttaattcagctaaacgggcaaagtcagtaactggaatgccgacaccaccatgcatgttgtttaaaccgtttgcttgtaaagcatcgattaaaagtgcagcaccagtaagtgatacatcttgtgtcacgaaaaaaaattctttcaaaaaatccccaaatgcttatgtttatgcatttcaaaaccaagatacacctcttgaattgtatatacaggcacaattgaataataaggtacgttattttaatatgcgcatataaaaataagcaagtcctaatatattagaacttacttattatacttttattcaaaattgtccatttcttcgattgccttttcccaggcagaatttgcttcatctaatttctgttgtacatcagaaagctgttcttgcagtggccccaatttatcaaagcttgaagcaatttctggattggccatttcggtttggatttcttgctctcgttcttcaagctgttcaatttgtttttctgcattatcaattgcacgctgcaactttctcttttgagaatcacgttgcttttgctcttggtaagaaagtttttgctggctaatttgtttgcttggctcgacttctgtctcagcggcactattttcagccatagctgcttgttttgccttctcatcaagataataagaataattgccatcgtagactttagcatgcccatcgcgaactaaaacaatcttattagctagttgattgataaagtaacggtcgtgggaaacaaagagcagggtaccatcaaagtcttttaaagctttttctagtacttcttttgcttcgatatctaagtggttagttggttcatccatcagtaagaagttatcatgttcaagtgataaaacagttaaagttaaccgtgctttttgtccaccagatagttgacctacggtcttatcaatgtctttagctgtgaataaaaagctggctaagattgaccgtacatcgcgttcaggcatggtcttatgacgatccccaacagtatccaatacagttttagatggatctagtctttgtaattcttggtcgtaataaccaatctcaagggatgcgccatacttaattgagccactcttgggcgttaattgcttcataatagtcttaagcagggtagatttaccgattccatttggtccaatgatcgcgacgcgatctcctttattaatctggaaggaaatatctttaaccatggttttatcgggataaccaatcgtcaaatcgttgaaaattaatacttccttgccagaaggatgatcgcttgaaaaatgaatccgtaccttatttttatgtttaggtggagtaatccgctcaattttttctagttttttacgccgactttgtgcacgcttagtggtagttgctcgaaccaagtttttttggataaattcttcatcttttttgatttcagcttgttgcttttcataagcggcttcttggtccttatcacgttgctcgcgctgcatgacataggctgaatagttgcccttaaaagcagttaatttaccaaattctagttcaaaaatttgggctgctaaatgatctaagaaatattggtcgtgggaaaccacgaggattgcaccactgtaattctttaaaaatccttccaaccaatctagggtatctaaatctaagtagttagttggctcgtccaataacaacagagcaggtttgcgcaaaagcaacttaacaaaagctaaccgtgttttttcaccaccggataaactaccaatcttcttttgccaagtgtcttcaggaaacttaaagccattcaagatacttttaatatcagattgataagtataaccgcctttttgttcaaagttgaattgcttttgatcgtattgcttaagcaattcttgatcttcaggatgatctgcaattttttcttgtagttggactaagctttttctttcccttattaaaggagcgaaaacggtttccatttcatcccaaatggttttattttcatctaatgcattttcctgagcgatataaccaacatcaatgcctttattaactgtaaattcgccgtgagttggttcttgctcacctgtcattatttttaacagggtagtcttaccaaccccgttaggaccaactaagccgattctggcattggaatcgattgaaaaattaacatttttgaataatgtgttggccccaaattgttgttctaaatcgtgtccttgtgcaataatcataatttttcacctaaccactattctaccatatagcgcaaattgtttgtttttaagttaaatatgtgaaaaaatgatgatttgtgaaaaagatacttgcataagtactatcatagcaggtatgatagtagtgcttgattgtacattcacaaacatttaagtttggagggttcctatatggaaaaaataaaaatcccaaaagcaacggcaaaaagattaccattatattaccgttatttgattattttaaatgaagaaggcaaagataaggtttcttcaactgagctgtcagaggcagttcaagtagatagtgcttcaattagaagagacttttcatattttggtgcgttgggaaaacgtggctatggatatgatgtaaagaatttattgagcttcttcaagaaaattttgaatcaagatactttaactaatgttgctttaataggtgtaggtaatctgggacgggcgctgcttaattacaactttaagcgcagtaataatattcgaatttcctgtgcttttgatatcaataaggagattactggtcgtatcttaagtggtgtccctgtttatgacatggacgacttaaagcaacaactaagtgatcaacagattacaattgcaattttgacagttccttcaacagctgctcagaaaaccacagatgaaatggttgatgcgggtgtaaagggaattatgaactttactccgattcgtttatcagctccagctgatgtgcgagtacaaaatgtagacttagcaaccgaattgcaaacgttgatctatttcttagatagtgacaaagaaaactaaatttgagtaaaagaaacatactaacctagtgttggatcatgaatcgacggattcacgatctggcactttttattttgtctaaaatagaaagtgaagataaagcaaatcaagtcttcagctttttagacacttgatgtcgtaaaagaaacggactgctttaccacctattcttaagtctcttcgaagtctgtgggcacttagatgccgtgtttagaaaattagaattaataggttgataaagaggtttatcttcacagcggaggttatattatggaatcacaaattattttcggtattgatgttagcagtaaatcttccacagtttgtgtggttaatgaccggatcaaacaaggcgaatcttttagaatctctaatgattcctttggctatcaaaaactttatgagcaactgaaccaatatttgataactcctttagttgttttcgaagctactggtgtttattctctaagcctgcaagctttcttagaggattatcatattaagtatttgaagcttaatccgcttaaagcgaaaaagctaatggacaataatttacgccataataaaactgataaggtagatgcttatcgcctggctttaattcaatttaatgccccgcaaaagctgcgtgatccacagcccagagagtatcatgaacttcagaatgccagtcgctattatgaagaacttactaggagtatagttactactaaaaatcaattgcaccgcaacctccaatccactttcccacaaattgaagaaatactgtctcatccatctggcagaatttattgggcgcttgttagtcttttcccacatgctggatatgttctagaaaagaatgagacacaggtaactcaaatgcttaattctatttctggaataggacaacaaagggcacggtacttaaccacaagattatacgcttttgctagagaagcttatccttatgattccaaagatagtattatcgttagagctattcaaaggaacatttctaatttattttcactccagcaagaacgcgactatgtaattaactacatggaaaagctggctaaagcagtaaacgctcgtgctttatccatctatttgagtatcccaggggttgctagaattacagcagtgagattagtagcagagctcggtgatctaagacggtttagcacttcagctcaaattgatgcgtttgttggcattgatccaggaaggtaccaatctggtgaaaaagacagttctcttggcattaccaagcatggcaatcatattgccagaaaaatactttatcgagttattactcaaatggagacggtaaaggctacgcagccttgccatataactgattattatgacaagaaaaaacgatcttcaaatagacaaggctataagaaaatcgccattgcatcagtccataaactgatacgcacaatgtttgctcttatcaaacatgatcaattatatgattacaacatagccaccgaaaataaaagactttagctgaaatcaaataatcaacttaagtataagcaacctatggaaaaactacaagtattcataggcttatttgtggtactttcgctttttcttaaatttaaactcttatttgctttaaccttattcgcatcattaaaacaagtaaatttattttcttaaatcattgataatacttgactttgggtagaaaaaagccgattttcggctttttttcatgcagttgtttcacttttgattaatttgacaggcaaaatataattcttttggcgcaatttttcgtcgggattggaaattcgggtaagcaataacttaaccaataaagttgcaatatcatgaattggctgagcaattgtggatagttccgaatggtaagtttgaatttgctttgttccgtcaaaaccaatcacttttaattccttaggcactttaatgcctaatttttttgcttcttgtaaaactaacactgcagttaaatcatctgtgcagacgacgccatcaggctgatcattgactaacatatcatgaattttcatatttttaatgttggaagaatcagaaaaagcaactgaacgaatgtgggctgaaaagtgacattcctttgcttcatcaagataagctgctagtcgttcgtcagtcggattaccttttctgtgttcattgcccagaaagtaaattttgtgacaaccagcttgaaccaagtcatgtactgccaacttgatgccttgataattatcacaactaacaattggaacattatcagatagctttcggtcgaaagagacaattggcaaacctagttgttggtattcattgatacctagattgtgcgcaccagcgatgatgccatcaacttgattagcctgaagcatgcgcagatattcgcgttctttttctttgttttgtcctgcattgcataggattactttatagttttgttggaataaagtggtttcgatatcctgtactaattccgcaaaaaaaggattagtgatctcaggaaaaatcaaaccgactaatttcattttctttccttgtaatgagcgggcaatagaattgggacgataatttaattcccgcattgcggcaaaaactttatctttagttttttgacttaaatagccatggttgttgattactcgcgaaacggtagttacagagcaaccggcttttttggcaacgtcgcttaattttgctgccatagtatcacctgatgtttaaagaattgtttgcatttgccaaagcttgccagtgtagtcaatgtcttgagcaaacgcaatttttttgttggtctgatcggcaaagtagcgtccagtcaataccttttcaccatcattaacgaatacttcaattaatgaatgatcaacaaagatatcaagcttgaggtcatgatttggtgaaagcgtaatagctcgactttcgccataatcaactgctactttttgcccagcatgagcacgatctaatactaatttaccatttttggtatcgaaattgagctgtaaactgttacttaagtcattatttgcagctaaatgtaaagtgccactttggttagccttaattgttaattcaagttcaaattgttggccggcttgatcgctgactacttgattagatatgcttgcttcgtttttgcggatactgcttattgccttaactggcgtttgaattaacttgtcactctttaggtggagttccttcacttgactcaagcagttagcccagttttcatcatcagtagggtaagtagtgtcaggcaagccaacccaactgacttcgtaggcattaccatctggggcgttaaaggcctgagtggcataaacatcgaacccgtgatccaaattgtgtaatttacctggattaattaacttatgattttcccagtcaatatcatcagcaataacgtacatatttgggtaaatgtcatcataagctgctacttttttgtctaaaccctgaggacagaaaatgaccacgactttgccatcaacacggacgatgttgggacactcgatcatgtagcccatgtcttcgttggtaaagtctaagaagcccaattcttcccagttctttagatcctgagacttccaaacgtcaatgtgaccgtgtttttcctttttatcttgggcacctaaaattgcgtagtaagtgtcattttctttgataatttggggatcgcgaaaatgttcggtgatgtgatctggattcttaaataggatggttttgtctgaaactttattatttttatccatccaagcaccgatttgataaggagtacgtacccaattttcatcgcggtggttaccggtatacatgatgaaaagcttaccatcgatttcgcgagcagagccagaataagctccatgtgaatcagccattgtgtctggttcaatacctaagcctaagttttcccagtgaaccatgtcagttgatttgaagtgccaccatgactttagaccgtgaactgcgccgaatggatatgattgatagaagaggtggtaagcaccatcaaagtaggaaaatccattagggtcattaattaagccagaaataggatgcaaatgatagcgcatttggtaaggggagtttgcggcttgtgcttgcaaatgcattaatgtatcagcgtcccaatcttgataaggtaagtaacgtttttctcttgtccattccataaatatacctccatgaaagcgttgtctttttacatgtattttaagttagtatgaaaaatatgtcaaacgtttaacagaaaaaataattattaattcataagtaataaaataaataaagaattttatgtcaaacgattgacatattttttgaatgcgttatcataattagtgaattgagaataaaacgtttacataggagggatcaatatggaccacagaaaagtggctgaacgagtaattaaagacgtcggccgtgacaatattattgccggtgcccactgtgctactcgtctgcgtttagtattaaaagatgattcaaaagtcgaccaaaaagcattggataatgatccagatgttaagggtacttttaaaaccaatggtcaatatcaagtaattattgggccaggagatgttaatgacgtttacgatgagttcattaaaatcactggtttgaaagaattatcaaccgatgatttgaagaaggttgctgcagaaggtaaaaagaagaatccagtaatggatttcattaaacttttgtctgacatctttgttccaatcattccagccttagttgctggtggtttgttgatggctttgaacaacttcttgacttcaccaggtctgtttggaccaaagtcagttgttcagatggtaccgaatgttgctggtatttcaagtatgattcaagttatgtcagcagctccgtttatttttatgccaattctagtcggaatgtcggcagctaaacggttcggtgctaaccaattcttgggtgctacaatcggaatgattatgacgacacctggactccttggtgcaaatcacttctgggacatttttggcttgcatgttgcgcaaactaactatcaataccaggttattccagttttagtagctgtttgggtattgtcaattttggaaaagtacttccacaagcacttgccatcagctgttgactttacctttacgccacttctttcaattatgattactggctttttgacttttacaattattgggccagtcttcaaaggcgtatcagatggtattaccaatgctatcgtttggctatatgacactactggtgcctttgggatgggtgtctttggtcttacctattcagctattgttactactgggcttcatcaaagttttccagcggttgaaactcagcttttagcagcctttgctaagaatccagccagctctggtgactttatctttgttaccgcatgtatggctaacgtagctcaaggtgccgcaactttcgctgtttacttcttaactaagaacaagaagatgaagggcttggctagttcatcaggtgtttcagcacttcttggtattactgaaccagcacttttcggtgttaacttgaagtataaattcccattcttctgtgccttaattggttcaggtgtagctgctgcttttgcgggcttgatgcatgttactgcagccgctcttggttcagctggtttcttaggcttcctttcaatttatcctaagactattccaatgtgggttgtttccgtattaattagttttgctgttgccttcatccttacttatgtttatggtaagggtcatttgaaggaagaagttgctgaacaagatgttccagtaaacgacgcaactgattatgctgaagaaactcaaaaggctgaaaagcttggtaaggaacaaatggcattaaaggatgaagttattgcttcaccagttgatggtactcctgagagtttaactaaagttaatgatcaagtattctctgctaagttaatgggtgatggtgcagccgttattccaagtgatggtacgatctattcaccagttactggtactgtgactattgcttatgaaactaagcatgcttatggcattaagtcagacgatggtgcagaagtattgattcacattggtcttgatactgtaaaccttaagggcgagcacttcgaaagtttcgttaagcaaggtcaaagagttaacaagggcgataagcttggtacagttgaccttgatgctgtgaaaaaggcaggctatgatactactgtcatggtagtaattactaacactgccaactatgcaaatgtttcaagaattactgatgcgggtgacaagcacggcgacaagttgattgctgttactgcacacaattagtttcttctactcctctagaaaaaattaaaacaattagaataaaagacgctaagaaagattgtttcttggcgttttttagtactaagtgttgcacttcaattttaagtttgagtaaaatgttctctataaagaaaaacaaagtgagggtatgttttatgaagttaaaaagtggagttattggagtattagtaactggattaactgtctttagcattaatctaactagctctaaaataaaggcagcgataacagtgcctaatcctaagacagattatgtagttaaaactacttctaatgtgtataagagtaatggtaagaggaccagttttaagacacgtggtcagatacaaaccggtaatgttccagtaattgaatcacaactatatgaaggcaagttcattaatgtgcaaggaactaagacgattaatggtactgcttattataagatcggtcctaacgcatacattaaacaaaataatgttttaaattatgctcaagaaaaagcaaagcttgaggcatatcaggcacaagatgatgtgaatgatgattcagatcagtcaacagaattaagctctgatgatgtgaattttgacatagcttggtatgacaacattaatgaggatccatctccagcgatgttcgatgattcaggatatcataatagagtgattaagaatgctcgtaaattattaggctatttcacttatggaacaggtgcataccgaactaattttggcagttggcgtcatcctaataaaaacggttcaactgattgttcaggatttgtgtggatcgtaatgaagagagcaggatatcgtgtaggaaatgctccattttttactctgccaatggaacgagatgctaaaagtactcatggctatttgaagaaaatttctgccaagaatattcgcccaggtgatattgtgattgttaatactggcaatggtgttggtcaaaacggacatgcagcaattgttgatggcaaatatgatggttgggacacgcaaattattgaagagggcggcaacttaggtgtagatgatgtgcaccgctctagtttaggtagctcactgagcgataagctggccaaaggtcgaatcacttatgctcgccccgttaaatagtatgctctatgctataattttgctaatcaataaaggataataagaatgaaaaagaacagcacgcttaaacatgtctggattatgacggctgtctattgggtagtaggtattctaagtattttctggggtaagcttgatcatacttttgcgtctcaattaaaagagatcaataatatttacgtgttagttttaataattatcttaagcttgccgctacttttatcgctgttattgtcggttaaagtaaaaatgccacgtttgatctgcaatccactagttgctgtaatttatctattagtggtaattgcagcaggtgtagcatataacttacaaaatattattggctacttcttcccaatcatcctcttcattattatggcgctagttgctgttttctatgctttggttaagacttttagcagcagaaaaagtggtaaatatttttttattgatggtaaagataagaaagaatgccatgatttctgggatgcttataagaagtactatgtaatgggattaacttacggcattattgatggtttgattactgtaattagttaaaaaagttaagaaaaatcaaaattagcactcaattgaaaaaagtgctaattttttcttgctttttttcacaaaacagtttattatcatatttgtaagttagcacttagcaaataagagtgctaatgattaatacagtaataaaaaatataatgaagaaaattaaacataagggggactaaacgtgttacaaccaattggtgatcgcgtgatcgttaaagttaagaaagaagaagaagaaactgttggtggcatcgttttagcatcaaatgctaagaagaagccaactgaaggcgaagttgtagctgttggtgaaggtgcttacgcatcaaacggtgaaaagattccaatggctgttaagaagggtgacgtagttctttacgataaatactcaggcactgacgttgaatacgaaggtgaaaagtacttagtccttcacgaaaaagacattttagctattgctaagtaatttagttaaaatttccaacgataattaagtaaattaaggagcatagataatctatggcaaaagatattaaattctcagaaaatgcaagacgttctcttttaaagggtgttaataagttagctgatactgttaagactactattggtcctaagggtagaaacgttgttttggaacaaagttacggcaaccctgacatcactaacgatggtgttaccattgcaaagtccatcgagttaaaggatcactacgaaaacatgggtgctaaacttgttgctgaagctgctcaaaagactaatgatattgctggtgacggtactactaccgcaactgttttgactcaagcaattactaatgaaggtatgaagaacgtaactgctggtgctaacccagttggcattcgtcgtggtattgaaaaagctactgaagctgctgttaatgaattgcacaagattagccacaaggttgaatcaagagaccaaattgctaacgtagctgcagtttcatcatcttcaaaggaagttggtaacttaatcgctgacgctatggaaaaggttggtcacgatggcgttatcactattgaagattcacgtggtatcaacactgaactttcagtagttgaaggtatgcaatttgatcgtggttacttatcacaatacatggtaactgacaacgataagatggaagcagatcttgataatccttacattttgatcactgacaagaagatctcaaacattcaagatatcttgccacttcttcaagaaattgttcaacaaggtaagtcattattgatcattgctgatgacgttactggtgaagctcttccaacacttgtattgaacaagattcgtggtaccttcaacgttgtagctgttaaggctcctggctttggtgaccgtcgtaaggctcagttacaagatattgctgctttgactggtggtactgtgattactgatgacttaggtcttgaattaagggacactaagattgatcaattaggtcaagctcgtcgtgtaactgtaaccaaggactcaactactattgttgacggtgctggttcaaaggatgctattcaagaacgtgaagattcaatcagaaagcaaattgaagaatcaacttcagactttgacaagaagaagcttcaagaacgtcttgctaagttaactggtggtgtagctgttatccacgtaggtgctgctactgaaaccgaattgaaggaacgtcgttacagaattgaagacgctttgaactcaactcgtgccgctgttgatgaaggttacgttgctggtggtggtactgctttagtagacgttgagaaggctatcaatgatcttaaggctgatactgcagatgaaaatactggtatccaaatcgtattaagagctttgtcagcaccagttcgtcaaattgctgaaaacgcaggtaagaatggtgaagttgttttgaaccacttactcaagcaagaaaacgaaattggctacaatgctgctactgatacttgggaaaacatggtagatgctggtatcattgacccaaccaaggtaaccagaaccgctttgcaaaatgctgcttcaattgccgctcttctgcttactactgaagctgttgttgcagaaattcctgaagaaaagccagctaacccagctccacaagctggtgcaccaggaatgggtatgtaattatatatcttaatgctttagcatttagatatataattcttgattacgaagtaatcaagttcatttacagtgctttagcactaaacttatgcacaaactctcactctagttcaaaaacaaatataattaaaatgacttcgaagttaaacaatcagttcagcttcgaagtttttctttttgtagcgtataatattgtacgtaactctatctaaaatacgaaataggaaagagacataaatgacggaaaaaacaactccaatgatggagcaatattacgaaattaaaaaacaatatcctgatgcctttcttttttatcgcgtcggagacttttacgaactgtttgaagatgacgcagttaaaggtgcacagattcttgaattgactttaacgcaccgatcaaatagaactaagaatccaattccaatggcaggtgtgcctcatatggctgtggatacttatgtaaatactttagttgaaaagggttataaagtagcactttgtgaacaacttgaggatcctaaaaaggccaaaggcatggttaaacggggaattattcaattagtgacgccgggaaccatgatgaatgaaggcccaaatgatgctaaagattcaaattacttaacatcagtaattaccactaagagtggctttggtttagcctacagtgatttatccactggtgaaatttatgctactcatttaaagagtttcgatgctgtttccaatgagctcttgtcacttcgtactcgtgaagttgtgtataacgggtcattatctgaacaaaataaagactttatgcacaaggccaacattacgatttctcgacctactccaattgaaggtgaacatgctgaaatttcttatgttgaacagaatttgactaatggggctgaaaaagaggctacccgtcagttagttggctatttgctttcaactcaaaagagaagtttagcgcacttgcagattgccaaaagctatgaagtaaatcaatatttgcagatgtcacatactgtgcagaataatttggaattggttgcttctgccaaaactggcaaaaaaatgggttcacttttctgggttttggataacacacacactgccatgggtggacgcttgcttaagcagtggctagctcgtccattattaaacatggatgaaattaaccatcgtgaagaaatggtgcaggccttgcttgatggctactttacacgagaaaatgcagttgatgccttaaagggtgtttacgacttggaacgtttaactggtcgaattgcttttggtaacgttaatgcgcgcgaattactacaattatcacgttctttgcaggccgttccagttattttagatgctttagagcaatcagattcagatatcttggtcgattttgctaaaaaaattgatccattaaagggcgttgccgaaatgattacttccactatcgtgaaggatccacctgtgttgactactgaaggtggcctgattcaaggtggggttgatccgcagcttgatcgctatcgggatgccatgaacaatggaaaaaaatggttggctgaaatggaagcagatgagcggcaaaagacaggtattgataacttaaaggtcggttataacaaggtctttggctattatattcaggtttctaacggtaacaagtctaaggtgccacttgatcgttatacgcgtaaacaaactttgactaacgctgagcgttatatcacaccggaactcaaggaacatgagaatctaattcttgaggcacagacacggtcaactgacttggaatatgatttatttgttaagctgcgtgaggacgttaagaagtatatccctgctttacaaaaattaggtgggcaactagcagcgctggatgtttattgtggttttgctacagtagctgaacaaaataattattgccggccaacttttcacgcagataatcaagatattaatgtgactaacggccgtcatccagttgtggaaaaagtaatgacggctggttcatatattcctaacgatgtcaaaatggatgaaggaaccaacatttatttaattacaggtcctaacatgtctggtaagagtacctatatgagacaaatggctttgattgcgatcatggctcaagtaggttcctttgtgccagctgatagtgctgatttgccaatttttgatcaaatttttacaagaatcggagcagctgatgacttaatttcaggtcaaagtacctttatggtagagatgagtgaagctaatgaagccttgcagtatgctactaagcgcagtttggttctctttgacgaaattggtcgtggtacggctacttacgatggaatggctttagctggtgcaattgttaagtacttacacgacaaagttggtgctaaggcattatttgctacgcactatcatgaattgacagtgatggatgagactctggatcatctgaaaaatattcacgttggtgctaccgaagaaaatggcaagttaatcttcttgcataaaatcctacctggacctgctgatcaaagttacggaattcatgtagctcaattagcaggtttgccgcgcaacgttttgcgagaggcaactaaattattaaagcggcttgaagcacaaggcagtgaactagcaccagtttcgcagcaattagatttatttgcagagcctgtggaaaacagtgttgaagaaactgaaacacaaaatgacaagcccgcaataactgatgcacaacaagatatacttgatgatatttctaatctttatttagcagataagacaccgttgcaggttatgcaaatggtagctgattggcaaaaagatttaaaggatgacgattaatgagcaaaattcatgagttatcggaaactttaactaatcagattgcagccggagaagtaattgagcgcccagctagcgtagttaaagaattagtagaaaactcgttagatgctggtgctactcgaattcgcgttgattttgtagatgctggtttgaaacagattgtagttcaagacaatgggacggggattgcacgtgatcaagttgatctagcctttacccgacatgcgacaagcaagattgccaatgaacacgatttatttaaagtttccactttaggcttccgcggagaagcattagcttcgatttctgctgttagccatgtggaaattctgactgcaactgaaaacgcaattggtattcgagctaactatagtggaggcaataaaaaaggccaagaagatgcagcggctcgtaagggaacaaaaattacagtcaaggatttgttctttaacacgccagccagattaaagtatttgcgtagttcaagaactgaaattatgaagattgtggatattattaatcgacttgtgttaggttatccacatgtgtcttttactttgtcaaatactggcaaaattttattaagaacgccaggaaataataatttaaagcaaacagttgctaacgtgtatggccgtcatatcgcagaaaaaatggaaaaatttgaggcaaaagacagcgattttaagattacaggtctgatgtctaaaccggaattaacacgttctacacgcaattttatttcgattctcttaaacggccgctatattaaaaattttcaattaaatactgcgattctggatggctatggctcaaaattagcagcgcggcattatccgattattgtgttagcaattaaagtagatcctttgttagtggatgttaacgtgcatcccactaaacaggaagttcgtttatccaaggaaaaagaactgggtcgtttaatcaccagtgcaattagtaatacacttgtggaaaaagttggacaaattagcgcttttgctaatttggaaaataaacgtgatacgctagttgatcagcttagttttaacttaaatcaagatgttgtaaatacagctcgtaaaaaagaaccggaaattcgcgaacaagaaaagccaaaatttttaacgattgaatctgatgattcagaagataatattcaaaatgaggcggtaaagcaggatagtgaaaagaaatatgttgatcttaatcagccacgtgaagatgatcaatatatcgttactaagacctggaaacaaaatgttgctctgcagcaagcactaacgccatttcctacaactaggactaatcaggaagtcatttcaagtggggatgaaactttagctaataatctgcctcgcttggtttatgttggacagaccgatacttatttatttgcccaacataatggcgacctatttttaattgatcaggttgctgctagacgaaggttaaaatttgagcaaatttttcacatgataactgccaaaaaagtagtacaacaaggtttgttaacaccaattattttagaatttggtaatcttgattttatgcaaattaaggatcaagtagaacagattaagcaggttggaatctatttggaagattttggacaaaatagttttattgttcgttcgtatccaacttggattcacgataatgtcgaagattcaattcggaagattttagatggttatttgaatgtggataaaggaaaggcaaagaacctgtttagccggatagcagcaatgcaagctaagcgagaaattactggcaagattaaattatctgcagctgaagctgagcaaattttacttgatttacgcaagtgtactgatccatatcatgatgcagatggacggataattttggttagaatgagccaaaatgaattgagaaaaatgtttaagaaggatgaataatgtacgaatattttgaaggtgtgattactgtggttacaccaagctatgttgtagttgatgtcgggggcgttggctacaaggtctatagtcctacaccttttgcctatactcaaggccaaaaagctaaggtctttattgagcaagtggtgcgtgatactggcattactttatatggttttcaaagtcaagatgataagggcttgttcttaaaactacttagtgttagcgggattggtcctaagagtgcaatggcaatcatggcagctgaggatagtaattctttggcggaagcgattgaacaaggtgaagttaagtacctaactcgttttccaggtgtgggtaaaaagacggcttcacaaattgtgcttgatttgaagggtaaattaggtgattatgttgctcggcttgatcgtccagacaatggtgagaatgtgccgccagcattaaatgatgcactgcttgctttaattgctttgggttatacccaaaaagaagtggatcggatcacgcctaaactggagaaagttgctgcaaatactgcagatcaatatattaaaaagggcttagcattactgcttaaaaagtagatcttggtataatagaacagatgattattttttaaggaagtgaaactggtggcagaagatcaagtaacttcaggtgatattgagaatcctgaagaacaacaaatggaactttctttgcggccgcaaacgctcgaccagtacttaggtcaaaagcgggtcaaaaaagaaatgagcatttatattaaggcggcgcgccaacgtgatgaagcattagatcacgttttgctttatggaccaccggggttaggaaagacaactttggctttcgtaattgccaatgaattgggagttcatttaaagagtacaagtggtccggccattgaaaaggcaggcgacttggtggcacttttgtccgacttagatcctggggatgttttgttcattgatgaaattcaccgtttagctaagccagtagaagaagtactctactctgcaatggaagactactatatcgatattgtgattggcgaggggcagactactcatgcagttcacgtgccgctgccaccatttactctaattggggcaacgactttggctgggcaattgtcagcacctttgcgtgatcgctttggcatcgtagagcacatgcagtattacactatcgatgagctagaacaaattgttttgcgttcaagtgatgtttttcacacttcaattgcgcctgaggcggcccatgaattggcacgacgctcgcgtggtacacctcgtgttgccaatcgcttacttaagcgggtgcgtgattttgcggaagttaagggagaaaaaacaatttcgctcgagactactgaaggcgcgttaaaacaattgcaggttgacgatgagggacttgatcagacagaccgcagattattgagaacgatgatcgaaggatataatggtggtcctgttggtattcggactttggcagctaatgttggtgaagatatggaaacgattgagtcactatatgagccatatttgttgcagcatggttttattttactcacgccgcgtggcagaatggtgacggataaagcatatttacagttaggattaccaattccaggtgataaatagtcccattttctgtataatggttataatatctagaaaataattttaatgaggtggaaattttgaacattttatttttagcaaatgccggtgctgcagcaagtagcaactggatgatgatcggtttatttattattttgatcgctttcacttactttggtatgattcgtcctcaaaagaagcaacaacaacaaagaatgcaaatgatggacaaattgaagaagggtgacgaagtcatcttagttgatggtttgcatggtaaggttgacaagatcaacagtgataagactatcgtggttgatgcagatggcatttacttaacttttgaaagaatggctgtccgtcgtgtgattccagttgctgcaccagcaactcctgcagctgaaactaaggctgaagctccagcagaaaagccgaaagaaaaagcagacgaaactaaaaaagaggataagtaatcatattacttaagagcgtcattttaggcgctttttgttttgctaaaaaaatccttgttgtaaaatagaagtgataattttagttcaaagaaagggatctgaaatgaagaatattcccgttgtaatgattctttttggtggtagtggtgatttggctcaccgcaagctttatccagctttgtttaatttgtatgaacaaggcttaattcacgacaactttgcagtaattggaactgctcgtcgtccttggtcacatgagtatttgcgtgagcaggttagtgatgctattcatgaaacgcacgatactgttgatgaaaatgagttgaaagcttttgcaagtcatttttattatcaatcacatgatgtaactaatgtggaacactatgagattttgaaaaacttggcacaagagctcgatgatcgttatagtgcacaaggcaatcgtctcttctacatggctatggcaccaagattctttggcacaatagcaacgcatattaatgaccaagacttgactggtagtggctttaatcgaattgtagttgaaaagccatttggtcatgatttggcttcagcagaggaattaaataagcaaatcacggcttcatttgatgaaaatgatatttttagaattgaccactatttaggtaaagaaatggttcaaaatatcatgccaatgcgttttactaacccaatggttcaaaatatttggtgcagcaagtatattaagaatatccaagttaccttggcggaacgtcttggcgtggaagcacgtggaggttactatgatacttcaggtgctttgcgtgatatggtacaaaaccatatttttcaaattattactctgctagcaatgccagaacctaaggatctttcttctgctagtgttcaccaagccaagcaagatttgcttaagagtttaattattcctacgccagatgatgtcaagaaatactttgttcgtggtcaatatttgggtagtgatactacttttgcttataagcaagagccaaatgttgatccagagtcaactactgaaaccttcgttgcaggtaaagttaagtttaatgagggaccaattgctggcgtaccaatttactttagaacgggtaaggaatttaaagaaaagaagaaccggattgacattgttttaaagcatattaataatccatatgggcaagctcattctaacaatattacgatcgtgattgacccaactagtgaaatttactttactattaatggcaaacgaattgaccaaccaggaattcgccgtgaaaacttaacttatgaattttcaaaagccgaaatggctaaggtacctgatggttatgaaagattgcttcatgatgtttttgtcaatgattcaactaactttacgcactggagcgaattgaagcgttattgggaatttatcgatgcagttgaagatgcttggcagaaggaaaatgaagcaggcaatccagccattgcacaatatttgccatacagaatggggccaaaggaagctaatacaatctttgagtcaccaactgaacattggatttatgaataaagaaaatttattaccgcaaaatgacatccatcgtcggattattcatctggacatggatgctttttatgcttcggttgaaatgcgggagcatcccgaatggaaaaataaggcattgattgttgggcaagatccacgacaaaatggtggacatggagtagtggctacttgcaattatgtagctcgtaagtatggcgttcattcagctatggccgcaattcaagcagtacgtttggttcccaaggagctaatagtttttactagaccacgatttgataaatatcgtgcagtgtcagctaaaatccattcttttatgcatgatgtgacagatcaggttgaatcagtggctttagatgaagcttatctagacgtgacacatccaaagatagagcaggagtctgcagttcaaattgctttagatttacagaaaaggattcggcaagaagtaggcttaaactcgtcttttggcgtttcctataataagtttttagctaaaatgggatcagaatacgccaaaccgtttggtcgaaccgtaattttgcctagtgaagtgcagaactttttagcaatgcaaaagattgagaagtttcctggtattggaccgaagacgcaagaagagctgcatcagatgggtgtttatactggggcagatttacaaaaaattgaggttttaaccttaattaaaaaatttaagaaaatggggtatattttagcccaacatgcacgtggaatagatttaagacctgttgttacagactcagaggctaatcgaaaatcaattggcatggagcggacttacgagcctgcaatttatactgaggatgaagccctaaccaatattcgtaactattgcaatcatttggaagcagcattaaaaaaacgcaattttaaggcaggtactgttgttattaaagtaagaaataataattttgatacggtaaccaagagaaaaaagttgaaaacaccttctgatagtcacttagatttttatgatgtggctcgtgacttgttcgaagcaacaagttcctttttagatgatggaattcgtttattgggagtcactgtaactgactttgaaaagaaaaaatatcaatcaatcagtttgttcgactaataaataaagctatttttctggtaaactagatacagatatttttacaagatgaggagattaaaaatgagtagttttgatgacatttatgaaaaaatcttacaatatcctacaattatcttgcaccgccacactagtcctgatccagacgcaattggttcacaagctggtttagctagagcattaatggaaaaattcccggacaagcgcatactttgtgctggggaaaacgatgaaggcgacttagcttggattaaccacatggatcaagtcaaggcaactgattacgaaggtgctttggtaattactactgataccgctaatacaccaagaatttctaataagttgtatgataagggtgactttttaattaagattgaccaccacccagatgttgatccatatgctgatatgagttacgtagatccagatgctccagcagcatgccaaatcattgtagacttcttgaatgaagagggctttaagattaccaaggaagttgcttacccactttatgctggaattgtaggcgataccggtcgtttcatgtatccagaaacttcagagcatacttttaaggtggctgctcaattagcttctactggaattaacattactgaaatcgctcgtaatattgctgatgtaacttttgatgaggcaaaattgcaagccttggcaatggacaagatggaaattgatcccgttggtgcagcttttacaattttgatgcagtcagacttgaagaagttaggtttgactgatgatcaagcaaatgttgctgtatctactccaggacgtattaaagatgtgcttgcttggaatgtttttgttgaaaaaccagatggtactttccgcgtacattaccgttcaaagggccctgtaatcaatgaattagctgctaagcatgatggtggtggtcatgcattagctagtggtgctaacgctaaggatatggacgaagtaaagcaggtatttgcggaagtcgttgaagtaactaagaagtttaaagaagatcatgaataatatttttatagattcaagaattaaaccagctattcaggctggtttaaagaagatccattttgaaaagccaactaaggtgcaggagaaagttattcctgctatgttgtctgacttgagtgtagtagtgcaagcagcaaccggttcaggaaaaacgcatgcttatttagtaccaatttttaatgaaattgaagaagataaacgctatgttcaagcaatcgttactttgcctagtcgtgaattagccgatcagctttatcaagtagcacggcagctccgtgatgcggcagggatgcatttttcaattgcacatcttgcgggcagaactgatcgtgaacgtcaattagaaaagtatcaaaataatactccacaattggtgattgcaactccaggacgtttgttagactttgttcaaaagaaggtttttgcagttgatcaagtaaaaacttttgttatcgacgaagctgacatgaccttggacatgggctttttgaacgacattgatcaagttgctgctaaattgccgaaggatgtccaaattgctgccttttcagcaactattccagttaaattgtctaactttttacgcaaatatatggctcatcctgatgatatcgttattgataatcctagtgttattgcgccaacgattaaaaacgatttgcttgatattggctcaaaggatcgcaagaatgtcttgtacaaattgttaactatgggacaaccatatttggcgttggtttttgctaacactaagcaaaaggttgatgagttgactaattatttgcaagatcagggtttgaaggtagctaaaattcacggtggggtaactgaacgtgaaagaaagcgtactctgcgtcaggttgagcaaggacagtatcaatatgtggtagctagtgacctagctgctcgtggcttagatattgatggtgttagtctggttgtcaattatgaaataccacgtgatattgagtttgtaattcaccggattggtagaactggccgtaatggtttgtcaggtcacgccattactttgattcgtgaagaagaaatgaaccggattgaagacctagaaaaaatgggtgttcattttgactttgttgagattaagaatggtgaattagtgccacgtaaacactatcgcagtcgtgaaaatcgtcaaagcaagaatcgtaagcttgataccaagctggtgggttacgttaaaaaagagaagagaaagcgtaagccaggttacaagaagaagattaagcgtgcgattcaagaggataatcgtcaaaaacgtaagttggaacagcgtcatgaggttcgtaaggcaaaacgtttgagaaagcgcaagcgtgaacaagggctttgacagaagcggattttgtagtacaattatttcagcttaagatatgttttttgatcaattatttcaaagagagagccagttagatgagaatggcttaataatagtcaaaaaatgctcctttaagtttcataattaagaatatcaagaggtaacaaacactgttgcaatcaaggtggtaccgcgcgtggagcgtccttgaagaaagcaatagtgttttttatttatttttagggagatttattttaatgaagaaactaaatagttcagagtttcgccaaatgtttttagacttcttcaaggatcatggtcacatgattatgccaagtgcatcattaatcccacaagatgacccaactcttctttggattaactcaggtgttgctaccatgaagaagtactttgatggctcagttgtaccaaaaaatcacagaattacttcatctcaaaagtcaatcagaaccaacgatattgaaaatgttggtaagactgcacgtcaccaaactttctttgaaatgcttggtaacttctcagttggtgactactttagagatgaagctattccttgggcatgggaattcttaactagtcctgattggcttggcttgccaaaggaaaagctttactgtactgtttatccaaaagatgaagactcatttaatgtttgggtaaaggcagggatgccagctgatcatattgttaagttggaagataacttctgggatattggtgaaggtccatgtggtcctgatactgaaatcttctacgaccgtggtcaagaaaacaacgacgttgctgaagacgatccagaaaacttccctggtggtgaaaatgcacgttaccttgaaatttggaacatcgtattttcacaatacaaccacttgccaaatggcaaatatgtagaccaaccacacaagaatatcgatactgggatgggactagaacgtgtgctttctattttgcaagatgcaccaaccaactttgaaaccgacttgttcttgccaattattcacgccactgaagaaatgactgatgacaagaagtacggcgttaacaaggaagacactactgctttcaagattatcgctgaccacgttcgtgccgtaagttttgcgattgctgatggtgcgcttccttcaaactcgggccgtggttatgttcttcgtcgtttgatccgtcgcgcagacttgaatggtcaacgcttaggaattaagggtgccttcctttacaagttggttccagttgttggaaaaatcatggaaagtcactacccagaagttatggatcaacgcggctttatcgaaaacgttatccaaaacgaagaagaaagatttcaatcaactcttgatactggtttgactttgcttgacgacttaatcgacaaggcaaagaattctaaggataagaccatttcaggtaaagatgccttcaagatgttcgatacttacggcttcccatatgaattgacttttgaatcagcacaagatgctggccttaaggttgacaagaagggctttgatgcagaaatggctgctcaaaaagagcgtgcacgtaaagctcgtggtgaccttcaatcaatgggacgtcaagatgtaactttaatgaacattaaggataagtcagtctttgaacgtgatacttacgaagaaccacatgcaaagctagttgacattgttgttgatgataagttggttgataaggccgatggcgaacatgctactttggtctttgacaagactccattttacgcagaacgtggtggtcaagttgccgaccacggtgacatttacaaccaagacggtgaattggttgccaaggttactgacgtacaacacgctcctaatgaccaaaacttgcactttgttgatttgattttgccagttgaaaagggtcaagaatacgtattgaagttagataaggaacgtcgtgaagggttacgtcactctcactcagcaactcaccttcttcacgctgctcttcgtcaagtcttaggtgaacacactcaccaagctggttcattagttgatcctgactacttaagatttgactttactgcaatggaaccaatgaccaagcgtgagcttaagaccgttgaagaattggttaaccaaaagatttgggaagctattcaagttaagactactatcactacccctgaagagggtgaaaagatgggtgctttagccctctttgatagcaagtacggtgataaggttcgtgttgttcaaatgggtgacttctcaagtgaattctgtggtggtactcacgtggacaatactaaccaaattggaatcttcaagattacttcagaatcagctgtcggtgctggtatgcgtagaattgaagctgtaacttctaagaaggcttatgaatacttggcaaaccgttcagacttacttgatgatattcaagaagaagttaaggcaaccaagccagataacattgtcgataagattgattcacttgaaagtgatttgcacgatgctcaaaagcaagttgaaactttgaacaagaagatcaatgctgctaaggctggtcaaatctttaatgacgttaaacaagctggtgacttgactgtcattgctgctactgcagatgttaacgggatgaatgacttgcgtgaacttgctgataactggaagagcggcaacaagtctgatgttttagttttagctgctgaaaatgctggcaaggctaatatgattattgctttagaccaaaaggcattagacaagggccttaaagcaggtaacttaatcaagatcgctgccccaatctttggaggtggcggtggcggccgtccaaacatggctcaagccggtggtaagaatccagcaggcttgaatgatgctattaaggcagttattgacgaaatttctaagaactaagaattaattaattgtgtttaagctttttttcaagtaaaattgttgacaggaggaataaatatgagttcgctagataagactatgcattttgactttaatcagaacaaaggaaaaaatgtttatgatactctgcaagatgtttacaatgcgcttgaagaaaagggctataatcctattaaccagattgtaggttacttactttctggcgatcctgcttatattccacggcataacgatgcccgtaatttgattcttaagcacgaacgtgacgagattattgaagaacttgttaagagttatcttggtaagaataaataatgcgtttattaggtttagatgtaggttctaaaactgtgggagtagcaattagcgatgagctaggaattactgcccagaagttggagactatccagattgatgaaagcagatataactttggtatgcgtccattgaagaagctagtcagacagtatgaagttgacggtttcgtattaggtttacctaagaatatggatggtacttctggtagttccgtagctagaagtaaggcatacggcaaacgactagaggaaaagtttggtttacctgtacattattctgatgagagattgacaacaattgaatcacgacgagtacttgttgaggatgcagggatccatgatcgcaagaagcgtaaacaagtaattgatcagatggcagcggtgctcatcttgcaaaattatttagatttacaccgaaaggattaaaatggcagcacaagttaatggtgacgatcaagatcgtcaaattactttgattgatgatcaaggtaatgaagaattgtatgagatattatttacttttcattcagatgattatgacaaatcttacgtgcttctttatccagccgctgttggcgatgatgaagatattgaggtgcaagctttcagttatgatgccgatgatgccggcgatgtaacaagtagtgatttgcatgagattgaatctgatgatgagtgggacatggtccagggagttttaaatactttcttagatgatgaccgcttgagtggtaaataataaaaagaggactggctgtggctggtcctttttgttagttttagaaaaaagataaaaatgaacaagaaaatattagagattttagaatttggcgaaattactaagcgcttgagtaaattagcgattactggtcccgctaaaaaagaagcggaggaattattacctagtggtgattttgaacaagtacaaaatgagttaaagcagactttagctttgactaatttgctacgaattaagggacaacttcctttaacggactttcaggacgtacgtccaagtactaaacgtttaagcgtgaaagctaatttaaatgctaaggaattaggtaatttattattagtattaagtttagctcatgaaattaatgactttttggcagaaatagatccaaacaaactggatttaactgcaattgatgaaattttagatcaattagatgtgccggatcttttatttagagaattaaagaaatcagttgattatgatggtgaggtattagatacagcctcacatgaactagctcgtttgcgtcatgatatacgttctaatgaagaggaaattaagaataagatggatgcttatactaagggcaatagtagtaagtatttatctgagcaaattgtgactattcgtgatgatcgctatgttattccagttaagcaagaatatcgggcaaaatttggtggggtagttcatgatcaaagtgccagtggtcaaacactgtttatagagccggaagccgttttaaatcttaataaccgccaacagaatttaattgctcaagaaaaacaagaaattcgtaatattttgaagcacttatctaatttggctcgtgaagaaattactagtttgaataatattgcggctgcattaactgaactagatttcttgcaggctaaagccaagttagcaaaagaaatgaaggcaagtgagcctcgtctgacacaagaccattctttgaacttattaaaagcgcgtcacccattgattgacccagaaaaggtagtacctaatgacattcgtttaggtggtgaatttgatactatgctgatcacggggcctaacaccggtggtaagacaattaccttaaaaacagcaggattgcttcaattgatggcacagtctggattatttatcccggctgaagaaggtagcaaggttggcgtctttaagcaagtttatgctgatattggcgatgaacagtcaattgaacaatcgttaagtactttttcatcacatatcaatgacattattgcgatcatgaagaatgttgattctgagaccttagttttaattgatgaaattggtgcagggactgatccagaagagggtgctagtttggcaattagtatcttagactttttgcgtaaaaaagatgctaagatcatggtgacaacgcactatcctgaattgaagctttatggttataatcggccacggacgactaatgcctcaatggaatttgacttaaagaccttgtcgccaacttatcatttgcagattggtattcctggtcatagtaatgcctttgccattgcccgcaagctagggatgcgtgaagatgttgtcaaaaatgcccagaacttaatgtcagatgaagattctgatattaataagatgatcaccaagttgaatacgcaaaccaaggcagctactgtggctcgcaatcgtctgcaaaccagtttggatcggagccaaaaattggagcaaaagttgcaacaagcacttgattggtataaccaacgtgtacaaaaacagcttgattttgcacaagagcgagctaatgaagttgttgccaaacgccgtaaaaaagctgatgagattattgctcaacttgaaaaacaaaagaacatgggcgtcaaggaaaataagattattgaagctaaaggcgaactcaacagtttagagcgtcaggctaataatttggctcataataaggtcttacagcgtgaaaaacgtcgtcaccatgtaagtgtaggcgatcgagtaaaggtcctctcatatggtcagacaggtacgattactaagaagttatctgaacatgaatatgaggttcagatgggaattatcaaagttaaggttagtgatcgcgatattgagaggattgaaaagggcgaaagtactaagcctagacaaactgttagagcaaccagtgcggttagaagaagtaatgctcatagcgagctggatttgcgaggccaacgctatgatgaagcaatgactaatttggaccgatatattgattctgttttactggcaggacttgatacggttacgattattcacggtattggtactggtgcgattagaaaaggtgtttggcaatatctccgcagcagcaatcatgtaaagaactttaattatgcaccagctaatgaaggtggcaatggtgcaacaattgtacaattaaagtaagcgtcttacttgcaaaaagtaagtataatagaatatacttataatataaataaatgaattgaaaaaatgtgaggtaataattatggttgaagcaattaatgatcaaaattttgaagaagaaactaagaatggtgtagcattagtagacttttgggcaacttggtgtggtccatgtaagatgcaatcaccagtaattgatcaattatctgaagaacgtcaagacgttaacttctacaagatggatgttgaccaaaatcaagatacagctaagaatttgggtattatggctattcctactttaatcgtaaagaaggatggcaatattgtagaccgaattactggttacactccaaaggaaaagttaaaccaaattttggatcaatatactgattaatttaaaaatcaaaaaaagcttgagacgatgttgccaatgtcattaagttaagacattgacaattaatattagacttttaaagcactgatttaacatttaattggttaaattggtgcttttttcgtacaacaaataaggcatagcacagattctgcttttttaagctacgcgatataaataatatacagctgatttgggcttaatatttctcttgtccttgcggcctggtctaattggaatggtataatagctgatctgaataaggatccgttcaaaatcttgcgttaaagaagaagccaaatacatgctctgaataatcaagcatgattgcttgaaattgatggcatattgatacttgcaatgcttttgcggaatataggcctgtgcatcaatttgactgattgcattaaacataatcatatgggcataaatttccatttcaataaatttatcttgtttggaatggaactgtacactgcctaaagaatacttcaatttcttgaaggaggtctcaataccccaacgcagatgataaagctctttaattctttttagcggataattttttcgatcaagattggttagcacaacttcccattcttctttgcctgatttggcatcattaattctaaatttgcaggctcgaaattttattgtgcataactcgccaaaatcccagcttagatcctgggtatttttagagcgatacttaatatattggcgataatgatgctggacatggtgaatattctcactggctttatgcgtgatgtagtaatagttagaagtagttaccaggcaggaaatctcacgatcacattcttgatcaggcaatgtcgttatttctttaactccgccttgtccagccttagttcgtattatgtaatgacagttaggcaggcgattgcagttttcaatcatattgaaactagtgtagccacgatccattgttacaatatatggaccacaattcaaagctttaagcatttgaacagccgctttgcgttcatccatttctgatttaggctgaaaaatacaatcctggtaggtattattcaatagatcatataaggcattaacgtgaatttgacaatagggtttctttttatgagaagaagcttgtacaatgttattcgatttcggattccagatttgattaaagtcagagccatcaatggcaaacaaacggtagtgatgatcaaaaagttgaatattaaatagattttgattaaaaacagtcagaatatgtttaaaacaagcaggagaaagctggcttttgcgttgaacataggcagaagtactaactactttatcgttctttttagttgcatcttcgccaaaagctctaaagagttcactgtttaaattctgaccttgcatgttaattgtagttttaaggactgtcgctgcatctaaagtgcgtttcctggtaaaagcatgaggattattaataaaatcgtgaatatgatccccagtattattgataatttgatcaagacgttctagaatattcttatgaagggctttcataattaacaccatctttctggcaataattttgaaggtttaaaatatataatatataagataggcgaaaaggctggtcttttcgcctttattttatacaaaaaaagagatcgaatccaaatgattcgatctctaaaaaagcacccttaattgtcaatgtcttaacttaatgacattgcgatgttgcctcaagcttttttgatatatcacttattttgatttacttgcttttttagcaagtcacgaatttcttctaaatagtcggcctcagttggaccagcttctttttctttcttgggcattactctatttaaagccttgatcattaaaaataccacaaatgaaatgatcaagaagttaatgacagaattgatgaagctgccatatttaaatgtagcatccccaaccttaaaaacgaggttagaaaaatcaattttgccggcaaagatcccaagtagggggttgatcaagttttttactaaagattgtacgatagcagtgaaggcagcaccgatgattacaccaactgccatgtccattacattgccacgtgaaataaactctttaaattctttaatcatgctctactcctatatctaatatatctaaaaaaatgcgattttaactaaagtatatagtagtggttatttatagtctatcaatttgcttttaaccgaagcgagcgataaattgaactttcttttctttatctaaaatattaatttcacattcggtggttcgaccagttgatttttgaaatgcttccgcgatcattccgccttcaagggagaattccttgctggcgctattcaaacgatcagtgacagtttggccacttaattcgtaagtagtaaatgatcgtctttctttaactttttctagcttaccaaattcagccatgttgaagaattcaactaaatcatcataatcacttaaatcatattttcgcgcgattctcttgccagcccaataaagaattgaggcgtcatcatcgcctaaaatagttggcaaaaggaaatcgcggtaaagttggttaataaaatatacgtgctcgtttgtgttttctgtgttttctgtcataaacttgttcatcccttttattcttttttattttaccgtaaactagtataagtagaaaataaatttttgattttaagagggttttattatggataatcgtccgattggattattggattcagggctaggtggcctatctgttgcaaaaaaagtaattgaaaaattgcctaatgaatcaactgtttttattggtgataacgctcatatgccgtatggcgatcgaactaaagaagagattattgaactagttagaaaatcagtccattttttgttagataaaaatgttaagctgataatttttgcctgcaatactgcgacagcaatggctatgagtacgattcaagcagaaatcgatccacaaattatcggagttattcagtcggggagtttggccgcttcacggacaactaagaataaaaaagttgcggtagtttcaactaaagcaacagcagaatcacatgcttatgctaaagagatccgtttccgtgatccagaaattcaggtaacggaattagctgctcctaaacttgcaccacttgtggaggctcaaaaagatcatgaaaccaacttaaaagtagttaaagagagtttgacccccttacaaggaaaagactttgacactttaattatgggctgtacgcattatccattgattcagaaagaatttaaagaagcaattaatgataaaaatgttactatcttggatcctgcagatcaagttgcacagtatacgtttaatgtgatgcggcgcgatggtttgtttagtgatggtaatgaaaaagtcagtcatgaatattacactacaggcgatccaactagttttgatcatttagcaaggacattcatggatgatgcaactttaacatctaagcatgtggatacggagaatgaataatggttaaagaaattttatttgcgactggtaatcaaggtaaagcaaaagaactaaaagaagcctttaaacaagctggggtagatatcgagattaagacgaatgctgacttagacaatccgcctcatccgattgaaagtggccatacgtttgaagctaatgccaagattaaggcccatgaattagctgagtttagcaagttgcctacgattgccgatgattcaggtttaatggttgatgccttaaatggggagcctggtgttagaagtgcacggtatgcaggcgaagctcacaatgacgcaaagaacaacgccaagttattagctgaattaggcggtgtaccggatgaaaaaagaacggctaaattttggactacgattgtagtttcgatgccaggtgaatttgataaagacttggttgtgtcaggtacttgcagtggtcgtattttggccgcaccacgtggtgaagatggttttgggtatgatccattgttttatattccagaaaaagaaaaaacttttgcacagatgactactgatgaaaagaatgagatttctcatcgtggtaatgcagtgcgaaaattgctccaagaattgccagcttggttagaacaatttgattaaggtaaaaatagctcagttcgggtcattcgtatgatttgaactgagttatttttagtgaaatgaggtggatatatatgtcaaaaagtattggggaagcgctgaaagaggaaagacggtctttaggattaacacaggaacaatttattaaagggattattagtgaatcgttttattcaaaagtaggacgaggtaagaatgaaatagtagcagtagatttactaaagattttagctgctaataacattagtgaagaagaatttttaaataaactaaatgttaaggaaaataataatttagaggaagacttaaaagttcaattacttaatgcatattctattcatgataaaaagaaaatcagtatgttagtcccaaaaatacaaaatgcagctatggatgaaaatactaaaatatcagctcgtttgattgatgcagttgtaaataataagattaatgatttaactcaaagagaaattacacaaattaagagaaaattttttgaagttgatgattggaccaaaaatattacaaccttacaacttttttgtaattcaatgcttttgtttgattttgatgagctggttctttttgtaaaaaaactggaaaaaacatgtaaagggaagttgatgaaattaccatttaatactcaaaagataattgcatcgatttgcataaattattttcataattgttatacaaatgattgtagtcgaaactgtcaaatcttttgtgtaaatagttctttctcgtaaattgattttttaattatttatttaatcaaagtaggattctaaggtgtcctgaacctgaccaaagcctttatgaattcgattgaaataacggtcattgtagctcattgcctgaataccaataaaagcatcaagcgactgttcagttggaaactctgccttaggcttagctttgcgcttgatcacattgttaaatgattcaatcatgttagtcgaataaattgaagctctgatctgcttgggatagttataaaagaccagcagatctggttctatgtctttcaagcttctgataacatggctgtaaaccttgccccatttggtatagaagtcatgcaggacagctgtggcttcttctttgtttgtctgttgatgcacctgtttgaattcgttcatgatcttttcacgatcgtcgacgcgtactttagcgcagatattgcgcatgacatgaaccaaacagcgttgaaaatgagctttaggataagtcctggccaaggctgttttcatgccaacaacaccatcagaaagaaagagttcaacttgcttcaagcctctggacttcatgttttgaagcatctctgtccagacttcaatgttctcactaggagcaatgcagtagtcaatgacttccttatgtccattaggtttaatgccaatggcaatatagactgcttcacgctcaacgctcaaacgtttctcggcgcaaaggaaggtatgtcgcatccaaatagacgcagaaaaacttgtcgcttagcttgcgtttgtggtaagcctcaacctttggaatcatctgcttggaaatatttgatacctgagctggactgtaatggctgccatacatcttttcaattagatcggctatttccctggtggtcacgcccttggagtaaagcttgataatcatgctttccaagatatccgagtgctgcttgtagtcaggcagcgtgtgctgatgaaattgaccgttgcgatcccgaggcacttgcacttcaattgggccaaattgcgtatcaactttgcggaaataagcaccatttctagagttgccagtattccagccatttctggcatagggatcatagcccagaaaggcagtcaattcagcttctagcaagttattaacagcctgttgtagttctttgcgcaataaatcatttattttgtctggattgaatagagcttgagcaaaatctttggtaaaatcattcatgaaggagttcttctttctgtatgtgtttttttgttcaaaccaatcatacgagaaaggaactcctttttctaatgtttaaagaaataaatttaaggaatcattcatccttacacaaactattttacagtctcaagatgcaagctatggttatgaaataatagaagaattagctaatattccggattttggaatatatgtgatagttactaatttttataaggcatattttcaaggcaataaaaagcaaagtcaacagatattagatttcttgaatcagaatggactaaacgaaatatctagcagattgccatagtcatatatgaagacttaattcaaatatgaagagtattagatttttttaatgtttatactataattttaataattaatgtaactcttaggattagcctaagggttattttagtaacaaaattatttatgtggagaaagaaaaatgagatcgcaatatttccaagccacttttcgaattgcacgtaagtcgaaaaagaatatgttgcttgctgttttattggtactttgcatgatttttgctgtactggttgtagaaaagcagaaaatcaacgatggctaccgtcaatggcgagactacaatgagtcagttcatgttaatgcagattatttttctagcaatttgctacgaaaaaaggattacaaacaaacttttaataatctgaataaacaggctgagtatttggccggtgtacaaaatggtgaagtatttgattcgcctcaagattatttgcaaaattccaaaaagttagtgcaaacgatgctggcgggttatcaaaataattatcgcggtgcttcaacgctaaatgttccaccgaagtatcaactgcaacaaaaattagtagtttatgattatttgtaccaacatcacttagcaattgtcatgaattctaaagaatctagcacctacttaatctatattttaggattagtcggcatgttcttatttttctacgttttatttattgctagtgatagctggatgattaatttatcacatccaactctgcttaaaaatattccttatcagattagggatgaagttgaaggcaaatttatcatcaatcttgctttgactttgcttccgttagtgattggtgtgttaggaagttacttatttgctggttttaagaatggctttaatagtttgaattatccagcagttttgtatttcggtaaaattagcgcggttccactgtggctttattgtttgttgtatttagtctatgcagttgtactagtgatgtttgtgactagcctggcattgttgcttaatcaattaactcatagcgtttatctaacgatttttattgcggcattggtctacagtatttcacttttaccgggtagcattgctaaatatcttttctttttaccttcagcttatctaaatatcagtaaggttttagatgggactgttgcaagtcaatcaattattccggcaaattgggcagttggtatgactattttactagtgtgggctgtagtgctggtaatctggttcaggcatttggttaaccaaggtggtgttgaaaaatgaaaaggcaatattttttatttcaattaaaaatatttttgactaatcctaaaaatgtggggctgtttttcattaccgtcgtgcttgcactttactttggtttagtcagcgcaccgcagcatcatgtgattgaagatgttgatccatatgcaatttcaaaagaatatcaagatgatcaagcctttttaaaggtggctgaaaaagaatttgcacgggcagataaaggtacttcggattatgatcccagtgaaggtgctaaagatgctgttaccacatatccgaccatcattaagtatgaccatgagcgtttaaaagcacttaagaatcatgattggcgtttgtataccaaatacagtagcaagtggtatcagaaaatggataatttgatttgggttaaagaaaatcagaattacatgtatcccttggaatactaccacaataataattacaaagaagatggacattttgggtatcaaagaacatttcacttctatgatggtttacttaaaagtaaagcaaaattagacaaaaatgttttagaagaacggactactttacagagattacagcagtcgctttctgggtggacgatgattattttaattgtgattgttgttttgtttgcggcagatatgataaccaatgatcaaaaataccgtacagtagtgaagaatattcctctttctaaaaggacaattctttggctaaaaactgcggttattgaagtgggaattttatttaactttctagttgcttttttagtcgttacgttgtgtactgcgccaaggtatggttttggctcctttaatttattaacgccaatttatactggtcgtctgtatttcaaaacgccctttgtttatcagacgctgggacaatattatcttggtttcttgatctttgcagttgtaattacctttattttcattagattgactttattattgtcgctgatttttagaaatgaatatgtagcggctattatttcaagtgttttggcaatgagtgctaaagttctttatttttcattgggtatgggctttgtttatccatttttgaaacacttaccaatgacatattttacaatcggcgaaagtttgactagtaatttatcgtatttaatggactcaccaggttgggactttaatgatgggattattccgttagttacattagcaattgtaattgaattaactatttggctattttgtcagtttagaaaagtagtattagtgaagtaggtgaaaacatgttaaaaattcataatgttaaattagcttttggcgaacatgttgtcttagatgaaattagtttaaattttcaaataggaactatcgtaggtttagttgcaccaaatggtacaggaaaatccacactactaaacgtaattttacataatcttgagccacaagctggttatgtagaatatgatcatttacgttatcgcagcaatcgtgagattattaaactgcatcgactgatttgtgcttttcctgatcaaagtgatctgtttccatttatgagcggtagggatcatttaaagctttatgcggatctttggaaaaattcggataaaaatgtagataatattattaataaattacagatggaaaaatatgttgatcgcccaacacaaacttattctttggggatgaaacaacggctttgttttgccatggtggttgcagctgatacgccagtaatgcttttagatgaggtgatgaacggacttgatccccaaaacgtacaattgatttcagattacttattagatctaaaaaaagaaaataaattgattattatggcttcacatttgttaaataatctacaatcttacgcagatcgtgtacttttcttgaaggcaggaaaggtaattgaagatctcgataatcaacatcaggctaagcagtatctgaaaattgaggcgaatgcaatagccgggacgcggttaaaagataaaagatttactaagttacctgataataaaattattgtgccactggatgataatctaggattagatcaacttatacttaaattgactaaagagaagattccatattcagttggtcgaattgatttggcagaattatttagtaaattttatggctaaggcaatttgattagataaaaatagctcagttcgggtcattcgtatgatttgaactgagttactttttacttattttgcagtagtttttgcaggtcgttctgtacttgcaaaagcaatattattttctcgtaaaatttgaatatattgggtcaaatacaaatttttcacagcagattgtttaccaggcttaacttgaaaatgaatggaataaacaaattttttccctgtttgttcggtcacaccgacaatagtaggacctgatacaattgtctttttctcaggctggatcttacgattgcattctttgattaacttgttaacttcatcaatatcgtttttggtatcaagatccaaattaatgtctagtgctacaccgccatgggctaggttttgcacaatggtaatgttgcggttagggatgaaaataattgagccatctgaacccttgagacgagtagttctgaggcctagttgcacgacggtaccaacattagtgccaatctgaactaaatctccaacatcaaattggtcttcacttagaataaagaaaccgttgaccaaatcactaacaaagccttgtgcgcccattcctaaagctagggaaaaaattccagcactggctaacaaggtgccaactggtacacctagaatagagagaataccgaataaatagaagaagataagggtatattgaaaaacgctgttaatcaaagctgtgatagttcgagttcttttattcttaactgtgttatgcttggctaagtaattattaattattttatgaccaaaatgggataaaaggtaaaaaatgagtgaagtaatagctaattgccaaataattgacaataaattttggctaattttactccaatcaatttcaattttctgtatatttatgtgagtaggaatcttcatttggtgtcctttctattgcttacgggtataattaagaataacaagacattaattgagaataaaggatattcatgctaaactttttttagatgttgatggaggtagaaaatgacaatttcttatggtgctttagcaggcttaattgcggcgattgcattcttaattttagtattatttacgattccaatgctaattcggaccgcgaagttgttgaaagaaactagtgcaactattcaaacaactaacgagtcaatgaagaaaatttctgaagatatggatggcttgatggatcaaacttcggatttgttagataaaactaatgacctaatgaccgatgttaatggtaaaatgaagacgttagatccagttgttaaagctgctgcagatttaggcgaaagcgtatcagaattaaacgattcatctaaaaagatcgctaaacgctttagcagcaatcatttaagccgtacgggtcttatttcttcaatagctgcgacggcatttgcaagacgcaagcgtcgcagaggtgaaaattaataaaggaggaattcaccatgaaaaaattcgcaagtttcttattaggtgccgttgcaggatgtgcagcaggttttctcgcaggttcacttcttgttagtgatgaacaagttgatgacgttaagaacaagattaaagataatgacaagcttcaagatttgaagaagaaatacgataatggtactgaaatcgttaagaatcaattagcatcattccctaagaatgttgaagatgattcagaattgaaggattttgacgacatcgtaatcgatgactcaaataaagatgacgatgacagtgaaaatgctgaagagtcagttaacgatttgaacaatgctgaaaaagatgatactgatgcagcatctacttcagaaaaaccacaagcttaattaaagtcaaaaagaaaaggagctggtcgtgatgatcaatgtcattaagttaagacattgacaaattatcgacttggacttttaagatcattcatttgcgatttatcgcatttgaatgctcttttttcatgccaaataaacccaaatcttgtttagaaattaggctacacgatataaataatatacagctgatttgggtttgagatttcttttgtcttttcgtcctggtctgatcggaattgtgtaatgactaatttgaataagaatctttttaaagatttcagttgaagaagaaattatatacatagcctggatgacaaaacatgactgtttgaaattgatcgcatattgatacttgcattttttttgtggtacatatgcttgagcatcaatttgactgactgcgttaaacataatcatgtgggcatagatctccatttcaataaatctatcctgcttggaatgaaactgtacgctacctaaagcatatttcaactttttgaatgaagtttcaatgccccagcgcaaatggtagatttctttgatcctttttaagggataatcggctctatttagattagttagaacaacttcccattcttctttgcctgatttaggatcattaattctaaatttacaggcacgaaattttattgtacataactctccaaagtcccagctgccatctttggtatttttagaccgatattttatatattgacggtaatgatggttaaccaaatgaacgttttctgtagccttatgggtttcataataataattagaggtagtcacccagcaagctatatccttatcacactcttgattaggcaactcagctacttccttaaatgcgccatatcccgttttagtacgtatgacataataacagttaggcaggcgattacaattttcaatcatgttaaagccggtataacctcgatccatagtaactatatatggtccgcaatttagctttttaagcatttgaacggcggctttacgttcatccatctttgacttaggctgaaagatgcagtcttgataagtattatttaacaggtcatagagtgcattaacatgaatttggcaatatggctttcctttatgattgagatttccaacgatattctctgatttaggattccagatttgattaaaatcagacccatcaatggcaaatatacgatatttatgatcaaataactggatattaaataaattctgattaaatacagttagaatatgcttaaaacatgcgggtgaaagctgacctttgcgttggacataagcggaagtactgactactttatcgttatttttaatagctttttggccaaaagctctaaacaactcactggtcaaatcttttccttgcatattaatagtagttttaatgactgtagctgcatctaaaaaccgcttcctagtgaaggcatgaggatcatcgataaaatcatgaatatgctttccagtatcattgataatttgatcaagacgatctaaaatatttctgtgaagggctttcataattaacaccagctttctggcaataattttgaaggtttaataatttaatcagagggcgaaaaggtaggttcttttcgcctttattttatgcaaaaaaagaaccaaatcataatgattcggttctacagagattagattcaatttgtcaatgtcttaacttaatgacattgtcgtgatgatcagctccttttttatgactaaaattagtctttaagtggtaaaacttttaagtctttgtcagtgtgagtaaaggtttcaaagccgtccttagtaacgacaccacaatcttcaattctgacaccagcaaagccagggatgtagatacctggttcaatggagaagcacattccttcttcaagaactaagtcgttaccttgtacgattgatggatattcatgaacgtttttaccaatgccgtgacctaggcggtgaatgaagtattcaccatagccagccttagtaatgatgtcacgagccacgctatctaattcttcagcggtgattcctggcttagcagcttcgattgcggcttgttgagcttcacgatcaacttcataaatttcgcgttgcttagcagtaggttcaccgtaagcaacagttcgactagaatctgatgcgtaaccatcgtgcatggtacctaagtcgaataaaactaattcatttggttgaacagtgttcatagttggaccaaggtgaggattagcggcgtttttaccagcttgtacgatggtttcaaaactttcatgcataacacctttttgaatttttagttggtaatcaatttgaccagcgatgcttctttcggtgacgccagttctaattgcgtcaaagccaatcttaaaagcgaagtctgcttctgcaccagcgccttgcaacttcttgatttcttcaggtgtcttgtaaagacgaattttttcaataaaaggtgaaacatcattagtaaaactagcgttaggaaattcaccacgtaagagttggtagtgggcaacagacaaatcatctttttcaattgcccaattatgggtatcgtgagttctctttttgacattagttgcgatgatgctccaaggattctcggaatcaagatagccgataacatcgccatcccatgcagatgcttttgcttcttctacgtttaaagctgggcagaaaataaatggttccgcatcttttaaaacaattaaagcaaagattctctcatgtggttccattgagtaaccagtaaagtaggaaatggtgattggattagaaatgtaagcaagatcattattggagtcttgcaaccattgttgtaatttatctaagttcatattgtcctcttttcttgcaaattatgtttactgtagtatatcatgatctcttaatgaaaaaatgaaagaaaagctgtaaacgtttgcattttatgcagcatcgtgatatctttaagtgaaggattttttggaaggactgagagataagagatgcataaacaagaagttacaatctatgacgtcgctcgggaagctaaggtttcaatggctacggtttctcgtgttgtgaatggtaatagtaatgttagaaaagagacacgtgaccgtgttctcgaagttattaaaagactgcactatcaaccaaacgctgtagctcaaggtttagcttctaagcggactactacagtagggttaattgtcccagatttaactaatttatactttgcagaattatctaagggtattgatgatattgcacttttatataaatacaacatcattattactagtattgaaaaccgcttgatgaaggaagatcaagttattcaaagtttgctgaataagcaagttgacggtgtaatttatatgtctaaccgtttatcagatgcagcagctgatgcctttaagcggactgatactcctgtggttttagcaggtactaaagacaatcgtgatgattttgcttctgtcacaattgactataagaaggctgatactgaagcattaaatttgatgtaccatgatggtaagaagcatttgggaatcgtagttggtgatcaagatgctgtagttaacagcgaaaacagaatccctgcttatgaagaattcatggaagaaaatgatttgggcactcctcgaatctatactgatattaaagactattcagatggttataatttatacccacaattagttaaagatggcgttgatggtgtaattgttactcgcgatatttcatcagttggtattttgaattctgcgatggatgcaggtaagaaagtgccagaagatttggaaatcgtgaccgccagtgctacgcagttagcttctgttgttcgtccagctttgactacgattaagcagccactttatgatatgggtgccgtagcaatgagaatgttgactaagttgatgaacaatgaagaagtagatgatactcatattgttttgccatatgaattagttaaaaagcaaagtactttaaatcaataattaagtgaagcaaaaaagaccagtttactggtctttttgttttagtagataattttgttaatctgttgaagcttttgtgtaaaagtggttggtgcaattgcttgattaggattatagggcaaaagcacgagattagtgtactgactgacccgtggtaaggactgataatctctgaaatcgtcttgactaaagaagccatagaacaagatatcttttgccttaacccaacctagtttggtataaatccacatgtttttaggactaccattaaaattttgaatttttaataattgatttgcgggtaatttttgctgcgttttggcttggttatcaggataacgataaattgtaactttttggttaggtttagcgataattttcttattttgataaggagcaatatctcgctttgttaagtcaaaattaacgaattctgccgaaataaaagttttttcagcaatttgataaaataagcgatcatctacacggacgccataagtgacattgactttttgacctggttgcacgtacttcttttctttgatgcgaacatacggattcatcattgtagcggctttagttttaccaaaataaattccagttctattaatagcgtactttttagtgccacttttggctaatttatatttaaaaccagtagcgggatagttggtaaccacgccatcaacattccgattaattagccaatgccatagggcaggcgattcgtccatttcggcccagacaaacagttgcttatgtaatttgtgaagccagtgaattaaaaagggatgctcttgcacaatgtcagaagaagcattgatagcattaacttgaggtaaattactgaaattaatgcgtttcaggctaccaacgatcaaaattagataagcttcaggcataatttttctaaagtgaaagagactagcagcggaaaatgaatgaatcatgattcttttctgcatatggtattttttaactatttgtgcgattttatcctctaactcataggacggatttaatccatgatcaattttagtctctaagacaaatttagtgtttggtttattttgataatgcttaaaaagctcactgagtgacataacgtgttcgccattgtcatattgcagttgtttaagtgctgtaaaattattttgtgatacaattgcatgtgtatgagtaactcggaagaggtcatcatcatgtgcaatgaccggaactccatcctttgagagctggagatcgagttcaacgtaatcagcaccagaattaaaggcggaatcgtcagcctgaattgtttcttcaggatatttgatgggatcaccacggtgccctacaactgtaaaaccactatttatgaaaaagactaagctaaaaaaaagaacccaaacgagtcggcttttaaatttcatgtgtacacctctatcgcatacttaacaatagcatggttacacatttttttctatttatagtactattcttttatcagtaatcggtatgattgaaatctaaaggatgagatttaatggaacaattggacttaattgaagaagttaccagaaatgatggcagtcgatattatgaaatctctaatattgaccaaaatggaattgcagaattagctgcagatcatggcttaattaaaaaagtcaaaatactgcagctgaatattcctcgaactaaggcactgattgcttatgaaaaatatatcaatgatacttatgacttgcagactttgactaatgaaagtgattggaaaaatccaaaatgggtagaatgggataaacctaagggaaaaattttagacgcatataatatgatcttaaaagccaatcgaattggttagaaagtggcataaaaaatggaacaactgcgaattttacataccaatgatcttcattcacattttgaacatttccctaaaatcggacgttacttgaaaaaagcgcaggctgatcaatcggttgatggtatctacacttttgatgcaggagactttatggatcggtctcatcctttaactgatgctacggaaggtcaagccaacatcaaattgatgaatgggtttaactatgatgcaattacgattggcaataatgagggaatttctaatccacattgggtattggaacatttatttgatcatgcggactttccgacagttttagcaaatttgcgtgaagaagatgaatcaatgcctaaatgggcagtcggccatatgtttttaactactaagaaaaagacgcgaattgctttaattggcctgactgcagcttatccaatgacttatggtcctaatcattggcatgtcaagatgttaggtgacagtatggatcacgaattagctcaaattgaaggaaagtatgatgtcttaattttattgactcatgttggattaaaaatggatcgctggttagctaaacattatcctcaaattaatttaattgtaggaggccacagccatgatctgattgaacatggtgaaaaagtggggcatacttggattacgcaaacaggtaaatggggaaactatgtgggtgatattcatctagaacttgaagatcatcacgtgattaaggtagtacctcgcactatttctactgcttcgatgccagaagaaccggaagataaggcagtgattcagggctactatgatgaaggtaagcgacttttatcagaacgaaaagtggctaatttacctgaaaaatttgcggatgataaagtagcagccgttcaagtttctcttgatgcgattgctgattttgctaaaacagatttagccattttaagctcaggcctattcttgcccccgtttaagagtggaataattactcaatatgatttacaaaatgccttaccgcatccaatgcacgttgttcgttcaaccttgaaaggttatgatttgtggcgactagtgatggaaattgaaaagaatcggcattacctagaccattttccactgcaagggatgagttttcgaggaaaaatttttggtcagatgtattacaaagggatcaaggttgatatgcgtagacgtgtagtttacgtcaatgggcatgaaattgatccacaaaaagaatataaaattgcctgtttggatcattatgtcttagttccattttttccaactttggctattgtcggtgaaaatgagtttttattcccacaatttttacgtgaagttgttggtaaatatttggctgaaaaatatcctttaacagcgagaagtgaaaaagatgactgaagaaaataaatttgaacaagaacagccaattagacacccacttgctgacgtggtgcaagatggtaagagcattaagattggtgcgcagctttatagcatcattgtcaatgagcgagacgcacttgatttagaatctttgcgtaaaaaatatgatccttatcttgaccagtatgattatctggtgggggacgtttctagtgaacatttacgcttgaaaggcttttataaagacggtgctagaaccgcaattgataaaaaagaaatggcgatcgtggattatttaacggaatattgtaatcccggcggaccttattttatcttggaattaacgcatccagtacattattatcagcatcaacgtactaaaatacggcgatcacgtgaacgacgcgagcgcgattttggtaaaaatgagcgttatcatgcacgacgtcgaaattatcggaagaataaaaatgaaaataatccgtttaagaagcggcgtgttcatcaaactaaatttaagaaaaaaacaatcaattgcagtgaaaaaagaatttggacggcatcattcatttattattaaaaagagaaagggaaactagtgaaagattaccgggtatttttaattgacttagacggaactgtttatcgtggtaaggaaacagttgaatcaggagtaagatttgttcatcgtttggttcaagcagggaaagactatttgtttttaaccaacaatacgaccagaacaccgcaaatggtagttgataaactaaagggacacggtatcgaaactgatacggaccatgtttatacgccaagtatggccacagctagctatattttacaaagagaacacaaggaaaagatcggcttgtatattattgggcagattggtctctggcatgaattattgcaacatccagagtttgagcttaatgaagaaaatcccgattatgtaattgtcggtatggatacagatctgacttatcataaagtacgagtagcttcacgggcgattagacgtggagccacttttattgggactaatgccgatatgaatttaccagcagaggatgagctaattccaggcaatggttcacaatgtgcattcgttgctgcagcaagtggagtagagccactgtatattggtaagcctgaatcaattattgtaaaaatggctttggataaagttggctatagcaaagatgaggcacttttggtaggtgataattacgataccgatattaaagctggctttaatagtggagtagatcagttgttgactttgacaggtgtgacgaccaaagtggatattgcagataaacgtcaaccaacaattttagttaataacctagatgaatttgaattatgattactaaaaacaatattttttcgctgatttatcattttttgtttgctgtttctagcagtgtaattggggcaattgtggctagttggccattattgtttatttttatgatcgtacaaaagacatatgagacggttcacatgtctttgtttaaggtaatgcataattataaccagctgatgttttatttgctctggccctttaaaaagcagcttaaaatggataatttccctacatctgctaatgcggcagaacattttgcggaatgtaagcatttatttattctgactctattagtttttattatctgcatcatagtgcactttgtttttaaacgacaaaagaaaaagctactgcttaatttggataaatcagtagcccttattttgctattattgccaattattatttttccatttgcagtaaccaatttcgacagtttctttgtgatttttcaccatattttgtttaacaatagtgattggctgtttgatcctaatactgacccaattatcaatgtgctaacggaaggcttctttgcttcttgttttgccgttgctggggttatttatgaattatattttgctgaaaaattattacgtaagtaaaaaagagttccttagtggaactcttttttgagtgatatttttttcttgattgcgacaattgcgattggcacaactgatactaaaatgatagcaattacgatcattgaaaaatggtcctttacaaatggaatattgccaaagaagaaaccgatgattgtgaacaatcctgtccaaagcaagccacccaagatgttgtaggtgataaatttaccataatgcatcttactgccgccggaaatgaatgggacaaaagtacgaataaatggtataaatctacctataacgatcgtaattggtccgtggcgctcaaagaacttttcagcggccaaccgattattttgattaattaatttattgaaccagctatgtttttcaccagctctggttgaccaggcaccaatttcatagttgatactgtcaccgattatggcggcgaatgctactataagataaactagccaaatatttaagccatacttaggattagcagccattgcactcgcagcaaaaatcaacgaatcgcctggaagaaatggaaaaacgactaagcctgtttcaataaaaatgatagcgaataagattaaataggaccaaccaccgaattggttaacaatcgggattaaatggtcatcaatgtgcaaaataaaatcgattaaactcatctggaactcctaaaaactagttgaatgaattgtcaaagttttttcagggaaaagatcacgcataatcgcggtgattgcaatctgggcttcgccaaaaccgagagcgattaaagggacgcgtccaagataggtaacaacatcgccagctgcataaacaccggcgatattagtttgcattgttgaattcaccttaatttgtgcgccagctaaatcgattccccattttttgacaaagcgattattagctttaaagccatatgcaacgactgcttggtctaacttgatattagttaagctatcttttcccatttcttttaaattaacgttcagttgattatcaaccaaattgatttgtttaggaagataaggagttaaaatttcaacattttttaaagacttaagttttttgacattagattcaagaccgcgaaattgattacggcgatgaatgattttgacattggcataattagctaattctagtgccaggtctaatgctgaatcgccgccaccaaagacgccaactgtttgtccgacaaattttgggggatctttaataaagtaatgaatccttttttgagtatcatcatccatagataatggtaaagctttaggtttaaaggcaccggcaccagtggtaatcaatatgctgcgggatgcaactatatcatcgataataaagccgtctttttgtttagtgacattttcaactttatggttagtaaaaatagttgtatccgttaaattatgtcgtaaattgtcgattagttcagttcctgtaatagagtcgtaagcaggaatatctttgattttcttaaaaggataaagcatttgtggctgtccgcctgtttcagataatgaatcaaacagtacggtcttgagtccatgaagatgggcaaatcgcgcggcaaataggccaacaggtccgccaccgataatagttaaatcaaattttttaattttaatgacctcctcaaagtagtgatgtatcaactttaacatgaattttgtaaatattcatttaaaaataagcttgtcaaaaaatgaattttaaggtatattattgaagtcgcctttttaagagcgagcataattctttattgaaaaaatacttgcaattaatattcaagtattatacattaataaagtcgcttcgagagatgcgacgagagcttaaaaacagacatgcaaggaaagaaaacaaataaaaagaaaaaagtacttgcaaagaagtaaataagctggtaatatatttaaatgtcgtcaggtgaaagcagaaaaagcttgagtaagacgaaaaaacaaatcaaaaaagttcttgacaaagaaatgatggtttgataaaatataaaagctgtctgctttgcaaaaaaagcaagacagaggtagtactttgaaaactgaacaaagtttcgctaaaagtgtgcgggtgtaaaaacccaaacaagaagcgaagtcaattcgcaagcaataaatttgagacaaagatcttaaataaggaatgagcaatcattcaaactttttaaaatgagagtttgatcctggctcaggacgaacgctggcggcgtgcctaatacatgcaagtcgagcgagcggaactaacagatttacctcggtaatgacgttaggaaagcgagcggcggatgggtgagtaacacgtggggaacctgccccatagtctgggataccacttggaaacaggtgctaataccggataagaaagcagatcgcatgatcagcttttaaaaggcggcgtaagctgtcgctatgggatggccccgcggtgcattagctagttggtaaggtaaaggcttaccaaggcgatgatgcatagccgagttgagagactgatcggccacattgggactgagacacggcccaaactcctacgggaggcagcagtagggaatcttccacaatggacgcaagtctgatggagcaacgccgcgtgagtgaagaaggttttcggatcgtaaagctctgttgttggtgaagaaggatagaggtagtaactggcctttatttgacggtaatcaaccagaaagtcacggctaactacgtgccagcagccgcggtaatacgtaggtggcaagcgttgtccggatttattgggcgtaaagcgagcgcaggcggaagaataagtctgatgtgaaagccctcggcttaaccgaggaactgcatcggaaactgtttttcttgagtgcagaagaggagagtggaactccatgtgtagcggtggaatgcgtagatatatggaagaacaccagtggcgaaggcggctctctggtctgcaactgacgctgaggctcgaaagcatgggtagcgaacaggattagataccctggtagtccatgccgtaaacgatgagtgctaagtgttgggaggtttccgcctctcagtgctgcagctaacgcattaagcactccgcctggggagtacgaccgcaaggttgaaactcaaaggaattgacgggggcccgcacaagcggtggagcatgtggtttaattcgaagcaacgcgaagaaccttaccaggtcttgacatctagtgccatttgtagagatacaaagttcccttcggggacgctaagacaggtggtgcatggctgtcgtcagctcgtgtcgtgagatgttgggttaagtcccgcaacgagcgcaacccttgttattagttgccagcattaagttgggcactctaatgagactgccggtgacaaaccggaggaaggtggggatgacgtcaagtcatcatgccccttatgacctgggctacacacgtgctacaatgggcagtacaacgagaagcgagcctgcgaaggcaagcgaatctctgaaagctgttctcagttcggactgcagtctgcaactcgactgcacgaagctggaatcgctagtaatcgcggatcagcacgccgcggtgaatacgttcccgggccttgtacacaccgcccgtcacaccatgggagtctgcaatgcccaaagccggtggcctaaccttcgggaaggagccgtctaaggcagggcagatgactggggtgaagtcgtaacaaggtagccgtaggagaacctgcggctggatcacctcctttctaaggaagcgaaggatatggagagcaggaatgctaagagaagtatccagagcaagcggaagcacactgagaaactttgtttagttttgagggtagtacctcaaagatttgaaaaacgccaagcgttagtcgggcctatagctcagctggtttagagcgcacgcctgataagcgtgaggtcgatggttcaagtccatttaggcccattgacataacgaagaaaaagagttaaagttatgtctggccgaaaataaaatactctgggggcttagctcagttgggagagcacctgctttgcacgcaggaggtcatcggttcgaacccgttagcctccattgatccagaaaaaggatcaaagagctagtacattgaaaactgaatataatccaagcaaaaaaccgagacaatcaaagagaacagattgtagagcgaccgagaagagaattcttgagtaaggtcaagtagaaaagggcgcacggtgaatgcctaggcactaacagccgaagaaggacgtgacgaactacgaaaagcttcggggagcggtaagtacgcagtgatccggagatatccgaatgggggaacccaatgcagagatgcattattgattagtgaatagatagctaatcaaaggaagacgcagtgaactgaaacatctaagtagctgcaggaagagaaagaaagatcgatttccttagtagcggcgagcgaagaggaaagagcccaaaccaagtgatttatcatttggggttgtaggactgcgacgtggcagtgtaagagatagttgaattatctgggaaggtaagccagagagggtgagagccccgtaagcgaaatctcaagcacgcctagcagaatcctgagtaggccgggacacgaggaatcccggttgaaaccgcgaggaccatctcgcaaggctaaatactagttagtgaccgatagtgaaccagtaccgtgagggaaaggtgaaaagaaccccggaaggggagtgaaaaagaacctgaaaccgtgtgtctacaagtagtcaaagcacattaaagtgcaatggcgtgccttttgtagaatgaaccggcgagttacgttatctagcgaggttaagtcagaaaagacggagccggagcgaaagcgagtcttaatagggcgaaaagttaggtgacgtagacccgaaaccaagtgacctacccatgaccaggctgaaggtgtggtaaaacgcactggagggccgaacccacgtaagttaaaaattgcggggatgagttgtgggtagcggtgaaattccaaacgaacttggagatagctggttctctccgaaatagctttagggctagcctcgtggagaggataatggaggtagagctctgtttggactaggggcccgtcaggggttactgaatccagataaactacgaattccagatatccatacacgggagtcagactgcgagtgataagatccgtagtcgaaagggaaacagcccagatcaccagttaaggtccccaaatctatgctaagtggaaaaggatgtggagttgcgtagacaactaggacgttggctcagaagcagccatcattcaaagagtgcgtaatagctcactagtcgagtggcgctgcgccgaaaatttaccggggctaagcatagtaccgaaactgtggatgtgttttaaagagcacgtggtaggagagcgttctaagagcggagaagttgaatcgagaggatcaatggagcgcttagaagtgagaatgccggtatgagtagcgaaagataggtgagaatcctatccgccgaaagactaaggtttcctggggcaggctcgtccgcccagggtaagtcgggacctaaggcaaggccgagaggcgtagtcgatggataacaggtagagattcctgtactgtgtcaaatcgttaagagcgaaggagggacgcaggaggtgaagcacgcatcgcgatggaacgatgttcaagcaacaagtgcggttaagagtcaaatgcttctaaccagcaacacgagttgtgaagaggagtgaattaaaagtagcgaaggtgtggtaatcacactgccaagaaaagcttctagccagagatgacatacccgtaccgcaaaccgacacaggtagtcgagtggagaacactaaggtgagcgagagaactctcgttaaggaactcggcaaaatgaccccgtaacttcggaagaaggggtgctagccaagagattggttagccgcagtgaataggcccaaacaactgtttatcaaaaacacaggtctctgcaaaatcgtaagatgacgtatagaggctgacacctgcccggtgctggaaggttaagaggaaagcttagcgtaagcgaaggtttgaattgaagccccagtaaacggcggccgtaactataacggtcctaaggtagcgaaattccttgtcgggtaagttccgacctgcacgaaaggtgtaatgatttgggcactgtctcaacgagagactcggtgaaattataatacccgtgaagatgcgggttacccgcgacaggacggaaagaccccatggagcttcactgtagcttgatattgagtatcttttaaacatgtacaggataggtaggagccagagaagataggacgctagtcttattggaggcaatgttgggatactacccttgtttgaaggatgctctaacctcgacctgtaagccaggccagggacagtgtcaggtgggcagtttgactggggcggtcgcctcctaaagtgtaacggaggcgctcaaaggttccctcagaatggttggaaatcattcgcagagtgtaaaggtataagggagcttgactgcgagagagacaactcgagcaggtaggaaactaggacttagtgatctggtggtaccgtatggaagggccatcactcaacggataaaagctaccctggggataacaggcttatctcccccaagagttcacatcgacggggaggtttggcacctcgatgtcggctcgtcgcatcctggggctgaagtcggtcccaagggttgggctgttcgcccattaaagcggcacgcgagctgggttcagaacgtcgtgagacagttcggtccctatccgtcgtgggcgtaggaaatttgagaggagctgtccttagtacgagaggaccgggatggacgcaccgctggtgtaccagttgttccgccaggagcatcgctgggtagctatgtgcggaagggataagcgctgaaagcatctaagtgcgaagcccccctcaagatgagatttcctttgcgtaagcagtaagacacctcagagacgatgaggtagataggctgggagtggaagtcctgtgaaggatggagcggaccagtactaatcagtcgaggacttgaccaaagcgaagcaaactggaaggttttttgcgagaaggattatgtttagttttgagtgtaaaagctcaaaagagtacggtggcgaaagcaagaaggatacacctgttcccatgccgaacacagaagttaagcttcttaacgccgaaagtagttggtgggcaactgcctgcgaggaaaggaagctgccgtgctcaatatggaggattagctcagctgggagagcatctgccttacaagcaggaggtcacaggttcgagccctgtatcctccatatcgagtcgttagctcagttggtagagcaacggacttttaatccgtgggtcgagggttcaagtccctcacggctcatgaccctatatatgcgggtgtggcggaattggcagacgcgctagatttaggttctagtgttttcggacgtgtgggttcaagtcccaccacccgtattgccaaccacatattgacaatatgccgatttagctcagttggtagagcatctgtcttgtaaacagggggtcgtacgttcaagtcgtataatcggcatttatattacgcggaagtagttcagtggtagaacatcaccttgccatggtgggggtcgcgggttcgaatcccgtcttccgctttcatcaacacgccggagtggcggaattggtagacgcacgggacttaaaatcccgcggttggtttcaaccgtatcggttcgactccgatccccggcattgatgatgcgcccttagcgcaactggatagagtgtctgactacgaatcagaaggttgaaggttcaaatccttcagggcgcatataacgggaaatggctcagtttggtagagcacctggtttgggaccagggggtcgcaggttcgaatcctgttttcccgattgtaatctaatggtgattggttacattttggcggtgtagctcagctggctagagcgtccggttcatacccgggaggtcgagggttcgatcccccccgccgctataattgtaagcttggacctttagctcagttggttagagcagacggctcataaccgtcctgtcgtaggttcgagtcctacaaggtccataatatggcttttatattaatatcgcgggatggagcagtctggtagctcgtcgggctcataacccgaaggtcgttggttcaaatccagctcccgcaatttggtccattggagcagtggtttatctcgcctccctgtcacggaggagatcatgggttcaaatcccatatggaccgtaagatggctcggtagctcagtcggtagagcaaaggattgaagctccttgtgtcggcggttcgattccgtcccgcgccatttcattttatattaggtgcgggtatagtttagtggtaaaacgaaagccttccaagctttagtcgcgagtccgattctcgttacccgctttatatgggcctatagctcagctggtttagagcgcacgcctgataagcgtgaggtcgatggttcaagtccatttaggcccattggagacatactcaagtggctgaagaggcgcccctgctaagggtgtagatcgggttattccggtgcgagggttcgaatctctctgtctccgctatatagaaaagtaactgttctagattaatttctagagcagtttttttgtgtaccgagcggcattcttagtccgatgaaagtgttagaactaagagccagtagcaatgatattatgagtatgggacgtttacaaaggagtaaatacctgctgaaacagtaaggaattacaaatgtatcgtcttatatgcaaccatatgtatagtggatggaaggagatgagttcgttaagttctctctgcattgaaaacacgtcataagatgttaaaaccttaattttgagttattgataaacctaaatgcatattattttgaatgacttaatggaaattattacacttcttttaggtaaaagtcttggacattgattcaagtcaataatcgtgtatataacatagggagagccgattgttttaaatttcttcttgtatgatctatattaaaaaaataattttgtgggggatttcatagtgatataaagaagcagtttaatatggaacaatttataaagatcatttagttaaagataagagaagctgttttgctctagctaatttgaagtattaagatagatataaatgttttacaacaaaaaaataaaaaagtacttgcattttgactgaatatctattaatattaaatacgttgtgattgagagatcacaatagtaatagctaattaaaaaaataaataaaaagttcttgacttttgaaatgtgattagttattataataaagtgctcttgagtgagttacatgacccgttggtcaagtggttaagacacggccctttcacggccgtaacatgggttcaaatcccgtacgggtcattgccacaatttatttttttggcattaagcaatggaggattacccaagtggcttaaggggacggttttgaaaaccgttaggcggttctgccgcgcgtgggttcaaatcccacatcctccttagttgaatatcgcgggatggagcagtctggtagctcgtcgggctcataacccgaaggtcgttggttcaaatccagctcccgcaatttggtccattggagcagtggtttatctcgcctccctgtcacggaggagatcatgggttcaaatcccatatggaccgtaagatggctcggtagctcagttggtagagcaaaggattgaagctccttgtgtcggcggttcgattccgtcccgcgccatcatctggaggagtagcgaagtggctaaacgcggcggtctgtaaaaccgctctctctgagttcggcggttcgaatccaccctcctccataatagggatatcgtataaaggtagtacatcggtctccaaaaccgctagtgtgggttcaattcctactatccctgtttaccttcatggcggaattggtgaaggggttaacacactggtttgtggatccagcatgcgtgggttcgattcccacattccgccctagtattgggatatagccaagtggtaaggcattagactttgactctaacatgcgctggttcgaatccagctatcccaattctaaataatttcataacttatggcggtgtagccaagtggtaaggcagaggtctgcaaaaccttaatcgtcggttcaaatccgacctccgccttatcaaccgaataagttgattattttaaaatttaatattatggcggtgtggcggaattggcagacgcgtcagactcaaaatctggtgtccattacggacgtatcggttcgaccccgatcaccgctattattatgaagcgatccaattattggatcgctttttttttattttaaaatgttagcattttattatataaattgcacatgaatacaggaatctttataatgctacatatggaggtactcaaatgaatattggtctttataccgatacatattttccccagataagtggcgtagctacttcaattaaaacgttaaaagaagcgttggaaaagcaggggcataatgtatttatttttactactactgatccgaacgtgaaaaaaggaactgtagaaccgaatgtatttcgttttagcagtattccttttgtctcatttaccgatcggcgaatagcatttagaggactatttgaagcaaccaaagtagctaaagaagtcaatcttgatatagttcatactcaaactgaatttgcattaggtactattggcaaatatgtagctcatcaattagatattcctgctatccacacttaccatacgatgtatgaagattacttgcactatattttaaatgggcatttgcttcgtccatatcatgttagacaatttgttaaaagctatttgaaaaatatggatggatgtattgctcctagtggccgagttgaagaattattacggcgctatggcgttcaaataccaattagggtgattcctactggagtagatttgcagggcatgaacaacgatattcaacgtgatgtgcggcaagaacttggaattgatcaagatgcgcctgtaattttaaccttaagtagaattgcagccgaaaaaaagattaatcatattttgaacgtaatgcctgaaattattgatgaatttcctaatgtgaaatttgttatcgcaggtgatggccctgatgttgatgtgttaaaggatcaggtagagcgattaacactagagaattacgttatttttgtcggtaatgtagagcatggcgatgttggtaattattatcgaatggctgatctttttgtttcagctagtgatacagaaacacaggggttgacttatattgaggctctagctgcaggtacgccatgtgtggtttatgacacagactataccgaaaacatttttgatcaagatatttttgggcagacatttactacacaacaagaaatgttagaagagattattactttgcttaagcaagggacgaaaagaatcccgcaggaacttttgcaaaataaattacagaagatttcagctgatcaatttgctaaaaatgtgtctgatttttatcagtatgcaattgatcactatcaacctaagcatgatgaggagactaaaaagaggaactaaatgattagaattaatatgttctcgcaagctgattctgttaaaggacagggtgtaggttcagcttataatgaattgattaaacttctgaggacgcacttagtagacgaattttatgtaacgattaacaaatatggcaatagcgatttaacgcattatcacacgattaatccaacctattacgcaaatagttttttaccagcacgtggcaggaagattggctatgttcactttttaccagatacattagaaggctcaattaagttgccaggcgtagctaaaaaagttttttatcaatatgtaattgatttttataaacgcatggatcaaattgttgtagttaatccaatctttattgataagttggttaactatggaattgatcggaacaaggttagatatattcctaattttgtttcaaaaacagaattttatgaagaatcattggccagcaaaaacgcatttcgtcatgaattaggaattccacttgataaatttgttgtttttggtgatggtcaagtacaggaacgcaaggggatcgatgactttgttaagatggcacaagctaatcctgatattcaatttatctgggcaggcggtttttcgtttggcaaaattactgatggctatgatcattacaaagaaatggttgacaatccacctaagaatatgacgtttgcgggaattgtagagcgagagaagttagttaagtatttaaatattgcagacttatttgttcttccatcatatgatgaattgttcccaatgtcagttttggaagcattcagttgtggaacaccagtattattgcgtgaccttgatctttataaggcaattatcgatggctattatctaagcggaaaagattttggcgaaatgaatcaagtattgcaaaaagtagttgccaatccacaaactttgcagaaatacagcgaattatcgcgtaaggcaagtcaacagtattcagaagatcatttagctaaaatttgggacgaattttatcatgagcaatatgaattaggaaaagagctaggtcaaatacattaatgaataaaaaacatttgtggggcattctggttgttttagcaatcagtgcctttgtgctatatgcagatttaaaagctacaccgatatcggaaatattacgggcagctcatggcctgaatatttttggattaatcatggtttttgctttaatgcttttgtcctatgtatgtgaagccggtatcttagctactttagctcatcgaaagaaagagcctaaaaggtcagcttggtcgtttttgcgaattccaattattcaagctctatttaatgcaattacaccaatgtccacgggtggacaaccatcacagctagccgcaatgattcaaatgggcatggaaggtggccgttccacctcaattttgctgatgaaatttattatttatcagatcgttgttttgtttgcctatgtatttacaattatttttggctttcatatggtaatgactaagttcgctggtttagcaatttttattgcaattggctttttgattcatgttagttcaattatctttttgcttgcaattatgtttgcttatcgttttactaaaaaggcaactaattggttaatggacttgttggcaaaaatgatgaaaaaggaacgagttgagaagtggcgtaaggcaactttagaaaagattgatactttttatgcagagagtcagaaactaaaaaaagaaaagaagaaattatttgttgcctcgcttttaacagtattgcagctacttttcttttactccgttccatttatggtattaacagcgctaaatgtaccttgttcttggtatcaagttacgcaaatgaatataatgattatcatgtttatggcgatcattcctattccaggtgcgtcaggaggggcagaatatagtttccaaacgttattctccaccttcatttcttcacatggtgcgttaattttggctatgtttatttggcgcttttcaacatattttttcggtatgcttctcggcatcttaggctggatttttaagccgaaaaagataaaaagcacaaaaatgattaatttttattaaaacaacggtgtcttactaaatttcgtagtaagataaattaccgtaatgagaggagcagaagcgcgtggaacacactaaatctttttttaggtggctgacacagactaagttaggcttttttacgattgttttagtcttgttttggcttaaaacttattttatctatttaactaagtttaatttaggagcagttggtccaatgcagcaatttttattgctgattaatccgattccttcagggatgcttttgctgggaattgggctattttttaaaggacgtaaatcctattggattattttagttatcgattttttgctaacactgtggttatttgccaatattttatattatcgcgaattttcaaactttttgtcattttcaattattaagacatcaggctcgacttccgataatttgggtaaaagtattgcaggaattacactagctagcgattttttagcttttgctgatattgctgtaattatcgtgttattggcgaccaaagtaattaagatggatgttcgtccactgaagctaaaagttaatttgttaattgaggctttggctgtcagcttaatgggactgaatttattgatggcccaaaatgatcgttctggacttttgacgagaacttttgataataattacatcgtcaaatatctgggaatcaatgaatacgctatttatgatggctataagacagcacaaactagtgcacagatggccaaagctaatgtttctgatttgaagtctgttagaaactatttaaaagaaaattacgttaaacctaatcccgcttacaccggcgtggctaaaggaaaaaatgtgttaatcatccatttggaaagttttcaacaatttctgattggctacaaatggaaaggtaaagaggtaacgccaaatctgaataagatttatcatcaaaaagagaccattagttttgataatttctttaatcaagtaggacaaggcaagacttctgatgccgaaatgatgcttgaaaattctttatacggactacaatcaggtagtgcaatgtctacgtatggtacttctaatacttttgaaagtgctccagccattttgcatcaacaagctggttatactactgctgtaatgcatggtggtgctggctccttctggaatagaaataatgcttataagtcatttggctaccaatactttatgccactgtctttctatcagaacaaaccaagctactatatcggatatggcttaaaagataaaattttctttgatcagtcaatcaagtacattgagcgtttaccacaaccattttatttaaagatgattactgtaacgaaccactatccgtataatatcgataaaaagaatcagacgattgataaaacgaatactggggatgaaacagttgatggttatgtgcagaccgcgcattatttagaccaagcaattggtgaatttatgcgttggatgaagaagacgggcctagataagaagacactagtagtattttatggtgatcactatgggatttcaggtaatcaccataaggctagtgcagaattacttaagaaagattcgtttaatgactttgataatttgcagttccagcgagttcctttgatgttccatatgaaaggactaaagggtggcattaatcacacctacggcggtgaaatcgatgttttaccaaccttactgaacttgctggggatcaaagacaaagatacgatccaatttggctatgacttgctaagcaaaaatgcaccgcaaattgtagcacaaagaaatggtgactttatcactccggaatattctaaggtgggtagcgattattatgacaccaagacgggcgaaaggatcaaacctaataagaaattaaaagaaaaattaactgcaatttctaacaccgtaactacacagctgtctttgtcagatcgtgtaattaatggcaatctgctccgattctataaaccaaaagggtttactagagtcaagccgaaggattacgactataacaaggcgccatctttaaaacgtttgtttgatgatccaagcaaaacttcactgtggtatcaaaatcatcgtaaaacgacgcaaaaagatttcaagacagatgcgcctgaactaaaaaaataactgcaaaaactagtaatttgtgataaacttggtaagtaaatcgtatgtgtgtattggaggcagcgcattgtataatttagttatgacgctactaatcattgtttcaatcttaattgtcattgcaacaatgatgcagccacaaaaacaacaagatgcattgaacgccttatctggcggtgccgtttttagtgggcaaaccaaaaaacgtggttttgaagcatttatggaaaaagtaacctcagttttattggtactctttttcgtctttgctattatcttagcttatatgtcttcaaaataaattttgtacctcccgatcaaaatatgatggggaggctttttttattaaatttaaagatcggagaataactgcatggcacaaaacgaaaaaattttggccggcgttttagaaatttttcgccataatccacaaaaacaatttcgtgtagatcaaattgaacgtgaagcacgtcgtgatagattaggtaattttactgaattaattaaggctctttcttttttagagcacgataaaaagattattacagatggcaaaggacaataccaattagctcaagaaaatactgaagttgaaggtgaatttagagctaatgataaaggctttggctttgttagattagatgatgaaaatgcggacgacgtctttgttgccgcagattataccaagtatgccgttaatggtgaccgagtaaaagtaaagatcactgctggtggtaatccttggaatggtaagggaccagaaggtcaagttgaagagatccttgaacatggtttggaaacgttagttggtgaatttcatccgctaactgatgaacaaagaaaaaacagtcattttatcggctatgctttgagtaacgataaaaagttgcataaataccgggtttatttgtctgaaaatggcttgatccctcaaatgggcgatatggttaaggtctcaattaaggattatccagatgaggaaaatcctgagtcaatgactggtgcagtagtcaacattattggtaataaaaatgaccctggcgttgacattatgtcaattgtggcagcacatgatgtaagaactgaatggcctgaagatgcaatggcgcaagctaatgctattcctgatcatgttactgaagaggaaaaaaagggtagagtagatattactgaccaacctgcagtcactatcgatggggatgattctaaggactttgacgatgctgtagttttatggaaaaagcctaacggcaattatcaccttggtgttcacattgcggacgtttctcactatgtgacagaaaatacgccgttgaacgaagaggcatttgctcgtggcaacagtacttacttagttgatcgggtaattccaatgctgccatttagactttctaatggaatttgttccttaaatgaaggcgtggaccggcttgttttgtcatgtgacatggaaattacgccagaaggtaaaagagtaggttataaaatttatccttctgttatgcgctcacatggtcgaatgacctacaacaaggttaacaaaactcttaagggcgaaatgaatggtttagaggataagtatgttaaactccgaccaatgcttgaagaaatggcagatttgcatgctgctttgtataaacaacgtcatcaacgtggtgctattgactttgaagaaccagaagcaaaaattattgttgatgatcaaggcaagccaacagatattgttttgcatgaacgtggtactgccgaaaagatgatcgaatcatttatgttaatggctaatgaaaccgtggccgaagatttcttcaaaaagcatgttccattcttgtaccgtgttcacgaaacaccagatgccgaaagaatcaagactttctttgaattttgtagcgcatttggcttgaatattcatgcggatccaaataacgttaagccaattgatttacaaaaagtagtttctaaaactacagatactccagaggaagctgtagtacaaatgatgatgctacgtagcttaaagcaagcgcattattcagaagaagcactgggacactttggcttagctgcagaatactatactcactttacttcaccaattagacgttattctgacttgatggtgcaccggatgatccatgcatatcaagaccaggggactaatgaagaagtgcaaaagcattttgctagttacttgccagatgttgcagaacaaacttcaacgcaagaaagacgttcaattgatactgaacgtgaagtaaatgacttgaagatgacagaatatatggccgatcaagtggggcaacactttgacgcggtagtatcttcggtaactagttttgggatgtttattcaattaccaaatacgattgagggattaatccatatttcgaatttgactgatgatttttacagttttaatgaaaaagcattgacgctaactggtcgaggtactcataagcaatataaggtagggatgccaattaaggtaaccttgattaatgctaacgttgaacaacatcagttagactttgaaatatatgatcctaatgcgcctaagcataagcataacgatcgcggaatgaataatcgtcgtcgtggaaaccgtggcttccgcaataatcatggacgccgtggtggtcagtttaataatcacagcgatcatggccgtggccgaggtaatggaaaccgtggaggtcggagaaattttaaacattagggattgatcttaatgaaaaaagaaaaagaagataatttaattgcacaaaataaaaaagcacgacacgactattttattaaggaaacattggaagcaggaattgctttaactggaaccgaaattaagtctgtacgagctagaagaatcaacttgcgggatggttatgtgcagatcgtcaacggacaagcctggctagaaaatgttcatattagtgaatataagcaaggcaatcggtacaatcatgagccactacgtagtcggcgccttcttttgcataaaaaagaaattgcacgtttggccaaagcacaatcagagcgtggtattgcaattattccacttaaagtgtatttaaaacatggctttgccaaggtattgattggtgttggccaaggtaaaaaggaatatgacaaacggcaaacaattaaagaaagagaccagaagcgcgatattcgacgcaagtatggtgtctaagatgagtctgagaagaatctcagactttttttgttgaaaaattttaaaaagtttttttattttcacaaagtaatgttcgaacaatttgaagaatgcagagaaaatcaagctaaatatttttttaattattatagaggcgaataatagtattaagatacgtttgatattgaaatattcatattaaaaatccgaacgaagagcaagacttgccaaagcggagaaaataaggtaaattaataaagtcgcttcgagagatgcgacgagagcttaaaaacagacatgcaaggaaagaaaacaaataaaaagaaaaaaagtacttgcaaagaagtaaataagctggtaatatatttaaatgtcgtcaggtgaaagcagaaaaagcttgagtaagacgaaaaaacaaatcaaaaaagttcttgacaaagaaatgatggtttgataaaatatgaaagctgtctgctttgcaaaaaagcaagacagaggtagtactttgaaaactgaacaaagtttcgctaaaagtgtgcgggtgtaaaaacccaaacaagaagcgaagtcaattcgcgagcaataaatttgagacaaagatcttaaataaggaatgagcaatcattcaaactttttaaaatgagagtttgatcctggctcaggacgaacgctggcggcgtgcctaatacatgcaagtcgagcgagcgaaactaacagatttacttcggtaatgacgttaggaaagcgagcggcggatgggtgagtaacacgtggggaacctgccccatagtctgggataccacttggaaacaggtgctaataccggataagaaagcagatcgcatgatcagcttttaaaaggcggcgtaagctgtcgctatgggatggccccgcggtgcattagctagttggtaaggtaaaggcttaccaaggcgatgatgcatagccgagttgagagactgatcggccacattgggactgagacacggcccaaactcctacgggaggcagcagtagggaatcttccacaatggacgcaagtctgatggagcaacgccgcgtgagtgaagaaggttttcggatcgtaaagctctgttgttggtgaagaaggatagaggtagtaactggcctttatttgacggtaatcaaccagaaagtcacggctaactacgtgccagcagccgcggtaatacgtaggtggcaagcgttgtccggatttattgggcgtaaagcgagcgcaggcggaagaataagtctgatgtgaaagccctcggcttaaccgaggaactgcatcggaaactgtttttcttgagtgcagaagaggagagtggaactccatgtgtagcggtggaatgcgtagatatatggaagaacaccagtggcgaaggcggctctctggtctgcaactgacgctgaggctcgaaagcatgggtagcgaacaggattagataccctggtagtccatgccgtaaacgatgagtgctaagtgttgggaggtttccgcctctcagtgctgcagctaacgcattaagcactccgcctggggagtacgaccgcaaggttgaaactcaaaggaattgacgggggcccgcacaagcggtggagcatgtggtttaattcgaagcaacgcgaagaaccttaccaggtcttgacatctagtgccatttgtagagatacaaagttcccttcggggacgctaagacaggtggtgcatggctgtcgtcagctcgtgtcgtgagatgttgggttaagtcccgcaacgagcgcaacccttgttattagttgccagcattaagttgggcactctaatgagactgccggtgacaaaccggaggaaggtggggatgacgtcaagtcatcatgccccttatgacctgggctacacacgtgctacaatgggcagtacaacgagaagcgagcctgcgaaggcaagcgaatctctgaaagctgttctcagttcggactgcagtctgcaactcgactgcacgaagctggaatcgctagtaatcgcggatcagcacgccgcggtgaatacgttcccgggccttgtacacaccgcccgtcacaccatgggagtctgcaatgcccaaagccggtggcctaaccttcgggaaggagccgtctaaggcagggcagatgactggggtgaagtcgtaacaaggtagccgtaggagaacctgcggctggatcacctcctttctaaggaagcgaaggatatggagagcaggaatgctaagagaagtatccagagcaagcggaagcacactgagaaactttgtttagttttgagggtagtacctcaaaaagagctagtacattgaaaactgaatataatccaagcaaaaaaccgagacaatcaaagagaacagattgtagagcgaccgagaagagaattcttgagtaaggtcaagtagaaaagggcgcacggtgaatgcctaggcactaacagccgaagaaggacgtgacgaactacgaaaagcttcggggagcggtaagtacgcagtgatccggagatatccgaatgggggaacccaatgcagagatgcattattgattagtgaatagatagctaatcaaaggaagacgcagtgaactgaaacatctaagtagctgcaggaagagaaagaaagatcgatttccttagtagcggcgagcgaagaggaaagagcccaaaccaagtgatttatcatttggggttgtaggactgcgacgtggcagtgtaagagatagttgaattatctgggaaggtaagccagagagggtgagagccccgtaagcgaaatctcaagcacgcctagcagaatcctgagtaggccgggacacgaggaatcccggttgaaaccgcgaggaccatctcgcaaggctaaatactagttagtgaccgatagtgaaccagtaccgtgagggaaaggtgaaaagaaccccggaaggggagtgaaaaagaacctgaaaccgtgtgtctacaagtagtcaaagcacattaaagtgcaatggcgtgccttttgtagaatgaaccggcgagttacgttatctagcgaggttaagtcagaaaagacggagccggagcgaaagcgagtcttaatagggcgaaaagttaggtgacgtagacccgaaaccaagtgacctacccatgaccaggctgaaggtgtggtaaaacgcactggagggccgaacccacgtaagttaaaaattgcggggatgagttgtgggtagcggtgaaattccaaacgaacttggagatagctggttctctccgaaatagctttagggctagcctcgtggagaggataatggaggtagagctctgtttggactaggggcccgtcaggggttactgaatccagataaactacgaattccagatatccatacacgggagtcagactgcgagtgataagatccgtagtcgaaagggaaacagcccagatcaccagttaaggtccccaaatctatgctaagtggaaaaggatgtggagttgcgtagacaactaggacgttggctcagaagcagccatcattcaaagagtgcgtaatagctcactagtcgagtggcgctgcgccgaaaatttaccggggctaagcatagtaccgaaactgtggatgtgttttaaagagcacgtggtaggagagcgttctaagagcggagaagttgaatcgagaggatcaatggagcgcttagaagtgagaatgccggtatgagtagcgaaagataggtgagaatcctatccgccgaaagactaaggtttcctggggcaggctcgtccgcccagggtaagtcgggacctaaggcaaggccgagaggcgtagtcgatggataacaggtagagattcctgtactgtgtcaaatcgttaagagcgaaggagggacgcaggaggtgaagcacgcatcgcgatggaacgatgttcaagcaacaagtgcggttaagagtcaaatgcttctaaccagcaacacgagttgtgaagaggagtgaattaaaagtagcgaaggtgtggtaatcacactgccaagaaaagcttctagccagagatgacatacccgtaccgcaaaccgacacaggtagtcgagtggagaacactaaggtgagcgagagaactctcgttaaggaactcggcaaaatgaccccgtaacttcggaagaaggggtgctagccaagagattggttagccgcagtgaataggcccaaacaactgtttatcaaaaacacaggtctctgcaaaatcgtaagatgacgtatagaggctgacacctgcccggtgctggaaggttaagaggaaagcttagcgtaagcgaaggtttgaattgaagccccagtaaacggcggccgtaactataacggtcctaaggtagcgaaattccttgtcgggtaagttccgacctgcacgaaaggtgtaatgatttgggcactgtctcaacgagagactcggtgaaattataatacccgtgaagatgcgggttacccgcgacaggacggaaagaccccatggagcttcactgtagcttgatattgagtatcttttaaacatgtacaggataggtaggagccagagaagataggacgctagtcttattggaggcaatgttgggatactacccttgtttgaaggatgctctaacctcgacctgtaagccaggccagggacagtgtcaggtgggcagtttgactggggcggtcgcctcctaaagtgtaacggaggcgctcaaaggttccctcagaatggttggaaatcattcgcagagtgtaaaggtataagggagcttgactgcgagagagacaactcgagcaggtaggaaactaggacttagtgatctggtggtaccgtatggaagggccatcactcaacggataaaagctaccctggggataacaggcttatctcccccaagagttcacatcgacggggaggtttggcacctcgatgtcggctcgtcgcatcctggggctgaagtcggtcccaagggttgggctgttcgcccattaaagcggcacgcgagctgggttcagaacgtcgtgagacagttcggtccctatccgtcgtgggcgtaggaaatttgagaggagctgtccttagtacgagaggaccgggatggacgcaccgctggtgtaccagttgttccgccaggagcatcgctgggtagctatgtgcggaagggataagcgctgaaagcatctaagtgcgaagcccccctcaagatgagatttcctttgcgtaagcagtaagacacctcagagacgatgaggtagataggctgggagtggaagtcctgtgaaggatggagcggaccagtactaatcagtcgaggacttgaccaaagcgaagcaaactggaaggttttttgcgagaaggattatgtttagttttgagtgtaaaagctcaaaagagtacggtggcgaaagcaagaaggatacacctgttcccatgccgaacacagaagttaagcttcttaacgccgaaagtagttggtgggcaactgcctgcgaggaaaggaagctgccgtgctcttttttaatattccggcttagctcagttggtagagcgcttgactgttaatcaagatgtcgtcagttcgagtctgacagccggagtactttgtatggaatgttgtccgagcggcttaaggagcatgattggaaatcatgtatacgggcttatacctgtatcgagggttcaaatccctcacattccgtaaatatatatgaattggaactatgttaacatagttcctttttttctacctaatttttcatatataatggagaaagggaggaaatatcgtgaagctacgaaaactaattccatttttatttttaatatctctattagctataacattttccgcttgttcgacaaagggagaagagaatactgctaagcatagagttaatattgtaacttctactaatatttatgcagatattgctaaaaatatagttggtaaacatggtcatgtacaagctattataaaaaacggcgatacagatccacatgattttgagcctacgactggctctgccaaagaagtagctaatgctaatattgttattgccaacggtctaggatatgatgactggatgactaatttagccaatgctaatgatattcatgtggttaaagttggtaatcaattgatgggattaaaacagggggataatcctcatatttggtataacttaaacatgcctaaaaagtatgttgattatctagttaaaacagcaagtaaaattgatccaaaacatgcagcatattttaagtctaatgctgcaagctatttgcaaaagattgatagtataaagaaaattgctgctaaaattaatgggcgtgaagataaaccggtttatgttagtgagcccgtgtttgattatgcactagaacggtgtcattttaagattggcaatcaggcatttgaagaagctgtagaaaatgaaacggatccgagtgcgcaagttattcatgagatgcaagtcaaaattaaagctagaaaaattgctttctttgttaataatattcaagcatcaagtagtacagttagtggcatggttaaactagcagagcaacataatattccagttctcgatgtaagggaaacaatgcctaatggaattagttattattactggatgaaagcgaattatcaaaaattatttgaaattttttaaaaataactattgcataattagggactatcaggtaatataataaacgttgtgattgagagatcacggtggtaataactaataaaaataaataaaaaaagttcttgacttttaaaacatgattagttattataataaagtgctcttgattaagagatatgacccgttggtcaagtggttaagacacggccctttcacggccgtaacatgggttcaaatcccgtacgggtcactaatggaggattagctcagctgggagagcatctgccttacaagcaggaggtcacaggttcgagccctgtatcctccattgttcgggactaccgccgccgcggtagtctttttttatgcaaaaagaacgaacaagcaaaattattattttatcggttcaagtcctgagaggattcactatgattagtgaagatgccttgtaaccgaatagccaatgtctatatagggggactaatatggaaagacgtttgtttacttcagaatcagtttctgaaggacatccggataaagttgctgatcagatttctgatgcaattttagatacgatgttaaagaaggatcctaattcacacgtagcttgtgaaacgatcgtaactactgggatggtttttgtctttggtgaaatttctaccaacgcttatgttgatattcaagatgtagtgcggaagactattttgaagatcggctatgatcgtccagaattaggttttgatggcaataactgtgctgtgatggttgacatcgatgagcaatcacctgatattgctggtggggttgatcactcacttgaaactagagaaaacaagtctgataacgatgaattggatcaaattggtgctggtgaccaaggtttgatgtttggctttgcgattaaagagacacctgaactcatgccattaccaatttcgcttgctcatcgtttaatgagacgtgttgctgctttgagaaaagaccatactttagattggcttcgtccggatgctaaggctcaagtcactgttgaatatgatggaaacaataagccattaagagtggatactgttgttatctctactcaaactgatgcagaagtttctaatgaagaaatccatcgggcaatgattgatttagtcattaaggaagttattccggccaagtacctagatgaaaagactaagtttttgattaatccgtcagggcgttttgttattggaggtccaaagggcgattctggtttaactggtcgtaagattatcgttgatacctatggtggttacgctcgccacggcggtggtgcattttcaggtaaggatccaacaaaggttgaccgttcagctagttatgcagctcgttatgtcgctaaaaatattgtggctgccggccttgcttatcgctgtgaagttcaattggcttatgcaattggtgtagctcacccagtttcaattatgattgatactgcgggtactggtaaggttgacgatgatttgttaactgaagcagtacgcaatgtttttgatcttcgtccagccggtatcattaagatgcttgaccttcgtcgtccaatctatgaacaaacggccgcatacggtcactttggtagaacagacgttgatttgccatgggaaaagactgataaaacacaagatttgcttgattatattaaaaataagcaataaataaaaagagaaagtaaaaaagaatgaaaaaaacaaacgtgcctatagtcacgcttgcgatttttatgacaacttttatgactgccattgaagggacaattgtttctactgcaatgccaaccatagtttctgacctagatgggctcgagattatgaattgggttatatcaattttcttgctaatgacggccgtttcaactcctttatatggaaaactggcggatagcattgggcggaagccagtttttttgtttggaattgcgttgtttgtcataggctcatcgctgtgtggacttgcacaaaatatggtggagcttatcttattcagagtaattcagggattaggttctggcgcggttcagccagttgccatcaccattattgcggatttatatgctctgcaaaaaagagcgaaaatgttaggtcttaactctggtttttggggagtagcatcagttattgcaccgctattaggtggctttatagttcagcatctatcctggcactgggttttctacatcaatgtgccaattggaataattgcctttttgctcgtaattttttgtttgcaagagcctaaacatagctctaagtctaagttagatttgcagggaaccatttggttagtaattttattgctagctttgatgtttttcttacaagatttaggttcaaacactaatatcgccataatggccgctctagccgttttagtggtaattagtataattatgttctttagagcagaaaagcgcgcagttgatccaataatgccactcactatgttaaaagataaggagttccttgcaattaacctgattacgttattgatttctggcgtagtaatcggctttgaattttacattcctacctggatgcaaggtattaatggtactaatccatctctagccggttttgctgtaacgcctagttcattaatgtggattgtaggttcgttcttaattggcgggatgctaggccgctgggggattaaaaagacatatgattatatgttattggttttagttgtggccgatttggttttgattttagtgccgatttacacatcattctgggtcttctgtgttattgctgcctttaatgggaccgcctttggggcaattacgacagcttcacaggtgagatcgcaggttttggtacctaaggatgacataggcgttgccacttcgtttaatacgctgatgaagtatctgggacagacaatgatggtttctatctacgggattgcttttaatacgatgttggcgcatgggttaagcaagagatcggggttgaatcaagaaatgatgaataaaattgtttctgcagaaaatgccaaaagtctggctgccaatgtagtgccacaattacggcaagttttgttaggcgggttaaaagctgtttacgttgtttctatgattgttattgtagtctcgattgtattgaatcaattgtatcgagatcgaaaattgaagaaaaattaagttgaaggagccacatgcaaagtagagcatgtggcttttttactggaaatttaatttcagtatttttattatatctacatatattgaaatattatttctatgaaagtaaaatagagttaaaagcaaggtgattaaatgaatgttagagatagaattttagagaattatacagagttaaaaaaatcatcacgtattattgctgatgcggtacttgaaaatccaaaaattttgttaaataaaaatgctaaagaaatagggaattatactaatacatctgcagcatcagtaattcgtttttgtaagcaattaaattataaagggttaaaggactttcaaatcgatttagctcaaagtactgtcaaacagtcacaacttaagccaatagatatgattgtaactaaagatgacaaagctgatgaagttatgactaaattaagggttagtttgagtcaaaactttgaagatttatctaagactattgatatcaaggatttacaaaaagctgtatccttaattaaaaaaagtcgagctgtgtatatagctggtattggggcttcaagcttttctgctaaggatcttttttataaactcattagaagtggaaaaacggttttttataatgatgatgtccacattgcattagagagaatatactattcaacgccaaaagatgtcatgatatgtttttcttatagcggattgactcaggaactattacttgcagttaaacaagctaaaaaaaataaaacaccaattgttgcagtgactagaaaatccgaatcccctttgagtaaattagcagatataaatttaaaattaccggatcatgaatcgctgatgagagttggtgctataaattcaacttttgctcaaatgtttatttcaaatgtgctttatttatgctcaatttcaagtgatttaggtgaggtaaaacaagaaatggaggctacaggaaagcttctcgaaaaattaaaagaaaggaatgattaatatgaatatcaaggatttaactacagagaaaagaaacagtgcaactatgcatatcgataatatgtcaactttagatatggttaaaactattaataaagaagatcagaaagttgctgaagcagtaggaactcaggaggagcaaattgctcaggcaattgacatggcttctaagaaataccatgatggtggacgattaatatatattggagctggcactagtggaagattaggtatattagatgcagtagagttagtaccaacgtatggaattagccctgatcgtgcaataggattaattgctggcggtaaaactgcaatgtatttagctgttgaaggtgcagaagattcagaatcacttgctgctgaagacttaggtaagctaaatttaactagtaaagatgtagttctaggattagctgctagtggtcgaactccatatgttattggaggattagactatgcacaaaaaatcggtgcagggacaatttcaattgcctgtgttaataatagtttaattggaaaacatgcagaaatagctattgaagctgtagtagggcctgaagtaattactggatcaactagaatgaaagcaggaactgcacaaaagatgatcttaaatacgatttcaacgggcgtaatgattaaacaaggaaaagtttatcaaaatgttatgattgatgtcttgcctactaataaaaagctagtaaatcgagcaattagaattattacgtcagttactaacgtatcaatagagcaggcgaaagatgtcttgcttaaagctgataaaaatgtaggattagcaattgttatggcaaaaacagggttaaatagtgatgatgcaagtaaactattagaaaaaaataataacaatgtcagccaagttttaaataattagctatactttgaaattaaatttcaaaaatcattgattatatgtcttaaaagtgatatttttatatttaagtaagcgcttactaataaagaataatgaaatattatttctatttgtacaaaaattgcatattagtgattgctttttcaaaagagttttgataatactactttgctaatgaatattagtaataagtaagggagggagaataatgaaacatcgcaattttttattagttgctctttcagttttacttttaggagcaggcttaactggatgcagtcagaaaaaagaggctacagctactccggctgttacacctcataagagtcaagttgttacaacaactatgtattcgaaaaaattacatatggattggaattatgatgtatatttaccagcaggttacaatccaaaaagcagtaaaagatatcctgttttatatatgttgcatggaatctatggtaatcatagaaacttgctagaaagatttaattctcaacaaattcttgatggagaaattcatcgctgtaataaaaagatgatcgtagtttttgttgatggctttaatagcttttatattaatcaaaagcaaggtgggatgcagatggaaagtgccatcgttgatgacatggtccctactattaataaattgtataagacagaaaccaatcctaaacatgtaggtattggtggtatctcaatgggtggatatggtgctgccagattggctttgaaatatccagatatttttggaaatggtgttctaatttctcctgcagtttggtaccgcttgccgaataacaacccaattaaaacttcacagtatgcttttcaagatggaaaaagtaactgggattggaaattttatgatagtgtatttccaactaggtacattaatagtaaatcagagaaagataagttctttgtagagactacttcaagtgatactaccgttccagtaaaaaatgtcgatcgctttgtgaaaactcttaaaaaccatgacattagtgttaagtttgtaagagacaacggtggcaaccataattgggcttattggacttcagcagctccacaagcttatcaatgggcattagataatttaaattaggaggtgtaaaaaatgagcaaagatagtgaattagccagtagcattttgaatgatattggtggtaaagacaacgtttccgcagttatttcatgtatgactcgtctacggattagtgttaaagatgattcaaaaattaatttagatcagttaaagcggcttaatggagttttaggagtagttcagtctgaaactttacaagttgtactgggaccgggaaaggttactaaagttggaactgaatttagtaaattagccggtgtgccacttggagaagaaggcggcgatgattccaatgaaacattagatgaagttaaagctagagctcaaaaaaataaagcggcacaaaaagctaaacatgataagcctttacaacgtggattgcatcatattgctaatgtttttattcctttacttccaggaattattgctgcaggtttagtcaatggtatctgcaatgttattgattatcaatctggtagtgcttttgccaatgattggtggtatttaactattaaaacaataggatggggactatttgcattcttaccaatctttgtagggatgaatgcagctaaagaatttaaaggtagtgcaattctaggtggaattggtggtgtattctgtttaaatttaacaggttttgctgcgtaccctttaaattcactggcagtatcaatgccattcactaataagccatatgttgctggtgttggtggtttgcttaccgcactgtttatggggatctttatcgcatggacagaaagacagattagaaagtttatgcctaatgctttagatacattcttaacacctctttgcaccctgatcttttgtggtttaatttcagtggttttcttacaaccagttggtggttggctaaccaatattatttacgtggctatggacttcttatatgataagttaagctggttcggcggttatattttatcgtcaactttcttagcattagtatctgttggtttgcatcaagctttaacgccaattcatgttatgctgaatgaccctactggtccaactcatggaattaactatttacttcctattttaatgatggccggaggtggtcaagttggtgctggttttgctctttggcttaagagcaaaaataagcgttttaaaaatatggttatgagttcaattcctgtagctattttaggagttggtgaaccattaatgtatgctgtgaccttaccattaggacgtccatttattacggcttgtcttggtgctggtttcggtggtgttgcagcatcattattccatttaggtactgtctcacagggggtatctggattatttggactgttaattatgcagccaggtcaacaggttgaattcttgattgctttgttaatttcttatgtaggtggctttgttttaacatggttctttggaatagatgaagcaagaattaatgaagtctttcctgaatgataaaattaaagaagtaattgaaatcattgtaactattacaatgatttttatttttaacggagaagaaaaaatgctaggaatatctgtatatttccaagattatgatgaaaactatttgaaaaaagcagctcaagctggtgcaaaatacgtttttacgtcacttcagattccagaagaagattattcagatctggatcaaaaattaccgagattttttgaattgtgcgatgaattgggacttgaagtaattcctgatgtttctccggctacattggaaaagctaggaattaaaggaggcgattttgaagccttaaaagataagggattcaaggccttaagattagattatggttttgatgactttgatttaatcaaaaagctacaaagaaatttctttattttattaaatgcaagtgttgtgtcactggactatttagatcgtgccagaaatgcaggggttgattttggtaaattagctttaacatataatttttatccgcatacagatacaggtatgggatggacagattttaaacgtaagaattggatgttaaaggactatggcttaagaactcaagcttttgttcctggggatgcacttaaacgtttcccactatatgaaggcttgccaactgtagaaaagcatcgtggagtttcgccttacgttgcagctgttgaattaattcatgaagcaaatgtggatgatgtgtttattggcgatagcaaggcatcaatcaaaaatcttcggtatattgtagattatcaaaaagataatattttaaacatagaatgttcgctattgccacaatatcaacagctgtatgatcaagtgattgaagtaagaaaggacatgccagaaaagctgattcgcttaagtttgcctagaaaacctgatattccaatttgtaatactttaaataggcgtaaaggcactattacaatgcaaaacaaattagctcaaagatatagtggtgaagttagtctgattaagtcaaatttaccttttgaagcacgtagtaatgtgattggttttatttcacctgagtatgtgaagttgcttgattttattgattcgagtacgaaaatcatttttagaaggctgacatagaagaaaggtgatattatgcttaatttggcaaataagatttcagatgtatatcctaatttgaataaaacttctaagttgattgctgatgtttattttaaagattcaactcttttcctaagtaaaaacttgcaggaattaggtgctattactaaaacaagtggcgcatcagtgattcgattttgtagaaaattgggtttcaaaggctttaaagattttcaaatagcttgtgcacaagaaatacctggcaagcaagataatacggtggatacaattattaatgaaaatgatgagccgaccagtgtgctttacaaattacagattagtttagaaaaaaatattgcagacattggcaaaacaattgatcatcaatctctagcttcagcggtacaattaatgcgagccgcacagaagatttatgtagcaggagagggtgcatctggcttagccgcacaggatttattttacaaattaattcgtagcggaaaagatgctgctttcgtccaaagttcgcacattgctttagagcaagtagctaatattaagacagaagatattttaattaccttttcttatagtggattaactcaagaaccactgctaatggcaaaacaggcgaaagaaaatcaagctaaaataattgcagtaactcgtgcccagaattcgcccttaaaggatattgctgatactataattgcgttaccatcaaatgaaaaattgttgcgttacggcgctgttaattcactatttgcagaaatctttgcttctagcttgctatatttgagtcttatttcgccaaatttaaaagaactaaatatgaaaatgaaaactacgcaaaatttgactaatcaattaaaagtgtagaatctataaaataacaactaaataaattttaaaaaatcaaaaatattttcatgatgaaaataataaaaataaagaaaaaaaggaccagtttggtccttttttagtactttttttgcggttggaataaatctatatttgacaatgctataattataaatggaaagtggcctaaaaataagataacactattgaaagcgcattatttgcctccttgaaagtaaatctaagtagctgtacacttaaattgagctgaataacgaacgttatttttggcagagacttgtaatgcgagtaggaattatgggggcgtaaaaatggatattactagtttagcaagattccaatttgctatgacgacgatctttcactttttcttcgtgccattttcaattggtacgatattcgttgtcgcaattatggaatcaatgtatgttcatacaggcaagcctgaatataaaaagatgaccaagttttgggcaatgtcattaagttaagacattgacaaattatcgacttggacttttaagatcattcatttgcgatttatcgcatttgaatgctcttttttcatgccaaataaacccaaatcttgtttagaaattaggctacacgatataaataatatacagctgatttgggtttgagatttcttttgtcttttcgtcctggtctgatcggaattgtgtaatgactaatttgaataagaatctttttaaagatttcagttgaagaagaaattatatacatagcctggatgacaaaacatgactgtttgaaattgatcgcatattgatacttgcattttttttgtggtacatatgcttgagcatcaatttgactgactgcgttaaacataatcatgtgggcatagatctccatttcaataaatctatcctgcttggaatgaaactgtacgctacctaaagcatatttcaactttttgaatgaagtttcaatgccccagcgcaaatggtagatttctttgatcctttttaagggataatcggctctatttagattagttagaacaacttcccattcttctttgcctgatttaggatcattaattctaaatttacaggcacgaaattttattgtacataactctccaaagtcccagctgccatctttggtatttttagaccgatattttatatattgacggtaatgatggttaaccaaatgaacgttttctgtagccttatgggtttcataataataattagaggtagtcacccagcaagctatatccttatcacactcttgattaggcaactcagctacttccttaaatgcgccatatcccgttttagtacgtatgacataataacagttaggcaggcgattacaattttcaatcatgttaaagccggtataacctcgatccatagtaactatatatggtccgcaatttagctttttaagcatttgaacggcggctttacgttcatccatctttgacttaggctgaaagatgcagtcttgataagtattatttaacaggtcatagagtgcattaacatgaatttggcaatatggctttcctttatgattgagatttccaacgatattctctgatttaggattccagatttgattaaaatcagacccatcaatggcaaatatacgatatttatgatcaaataactggatattaaataaattctgattaaatacagttagaatatgcttaaaacatgcgggtgaaagctgacctttgcgttggacataagcggaagtactgactactttatcgttatttttaatagctttttggccaaaagctctaaacaactcactggtcaaatcttttccttgcatattaatagtagttttaatgactgtagctgcatctaaaaaccgcttcctagtgaaggcatgaggatcatcgataaaatcatgaatatgctttccagtatcattgataatttgatcaagacgatctaaaatatttctgtgaagggctttcataattaacaccagctttctggcaataattttgaaggtttaataatttaatcagagggcgaaaaggtaggttcttttcgcctttattttatgcaaaaaaagaaccaaatcataatgattcggttctacagagattagattcaatttgtcaatgtcttaacttaatgacattgaagttttgggctaatatctttttattgagttttgccgtcggtgttgtaaccggtatcattcaagaattccaatttggtatgaattggtccgattattctagattcatgggggacatctttggtgctccacttgcttttgaagcattgttgtcattctttattgaatctacctttattggtttgtggatgtttacttgggataaagtggggaagaaattacacttattctttggatggatgatcgtctttgggacaatgacttctgcattatggattttaacagcaaactccttcatgcagcatcccgtcggctttgctttacgcaacggtcgtgccgaaatggctgactttggagcacttcttaagaatccacaattaatgtatgaatatggtcacgtaattgttggtgcacttttaactggtactacaattttgactgggttagctgctttccaactattgaagaaacgtaacctttcagacattaacaagaagatctatcgtaagacaatgcgtttaggcttaatcttaatgttaattttctcagctggtgaaattgctgtgggtgatatgcaaatgcaatatactttgcatgatcaaccaatgaagttcgccgcaactgaagctgtttataagacaactggagaaaaggctccatggacggtagttgcaattgctaatccaaagacccatgaagttaagggaattgatattccagacatgttaagtattctttcttaccacaagactactggttctgtaaaaggtatggaagaaattaacaaagaacttgaaaagaagtatggtacacatattgatggtcgcaagatggactactatgtaccagttaatactttattctggtccttcagagtaatgtgtggttttgctgcattattattcttgatggcaattgttggtttaatcatgactcgtaagaataaagaaaccctttataaccatcgttggctattatggatcttcgcacttcttacattctcaccattcttggctaacactgccggttggttaattaccgaacttggccgtgctccatggacagtttatggattatttactattgatcaaagtgtttcaccgaatgtttcagtggcttcacttttaacatcaaatattgtttacttctgcttatttactattttagcaattatcatgattgcattggttgttcgcttcatgcacaacgatccagatgaatatgataaggctcaagaggcaagcaaagtagttgatccgttctcaaagggggccatttaaaatgtcatttttacaaatactttggtttatcttaattggagtattgttctcaggcttcttcttccttgatggttttgactttggggtaggaatggccgtgaagactttagctcataatgaacctgaaagagatcaagttgttaggacaatcggaccagtttgggatggtaatgaagtttggttgattactgctggtggtgcaatgtttgcatcattcccatactggtatgcaaccttattctcaggttactatttaattttattattgatcttagttggcttaattattcgtggtgtgtcatttgaatttagagcaaaatgtgctccatatcaaaagcatatttgggataatgcaatggcgatcggtagcgtaatggccacctttctctttggggtaatgtttatctcaatgattaaagggatgccaatcgatgctaaaggcaatatttcagctagcttctttgactactttaactggttctcaatcgttggtggtattgctttaacacttctttgctatttgcacggcttaaactatattactattaaaactaagggcgttatttcagatagagcacaaaactatgcacaagctttatactgggtactctacgtcggtgaagttgtctttgctttattattgattttccaaaccgacttcatgagagtacatccaattgcaactttagtatgcttagcattaattgttggtttctctgtagcagcacatgtagctactttcactaacaagcaaggaatggctttaacttgcagtggattaacgttgatctcattggtcgccttaatcttctgtggtttattcccaagagtaatgatttcatcaatcagcagtaaatatgatttgttgattcatagtgcatcatcatctaactacactttgattgttatgactgttgctacttgcatcttggtaccatgtgtcttggcttacaccatctgggcatattggatttttcgcaagcggatttcaatgccaagaatcggagaggttaaataatgattgataaacagctatttaaaattgatggcgctggttcaatcttaaaaaaacttgcagggcttgagattctgcaagctttttttatagtaggacaagccttggcactagcgtcagtcttaagcaaattgtgggcaggtcaacctctcgattggctactactaattacttttgcagcttgctttatcgccagacaattgatcagcacactgagagattcaatgttagaaaaatattccggtcgggttgcagaagaattaagacagcagcttttaaataaagtctttcgtgatggacaggctttagtacaaaaacaaggaaccggtagtttgattactatgtccctagatggtgttgatgaggtcaggcaatacattaagttaatctacagcaaagttttaacaatgatgattgtgccagttttaatctttgtcggcatgctgtttttaagctggacatcagctgtgattctgctagtcatgtatcctttaattgtcttattcatgattatcctaggtcatgctgcacaggatcgagcaattaaacaatttggtaactttcaggttttatctaataactttattgattctttaaggggaattgatacgctgaagtatttaggcctgagtaaaagatattccaagtcaatttttaacttgagtgagggttttagaaaaaagacgatggcggtgctaaaagtagcaatgctttcaacttttgccttagactttttcactaccttgtctattgcaatcattgctgtttttcttggttttgacttgatgaatggtaaaattgcactttttcctgctttaggaattctgattctggcgccagattattttttgccaattcgagattttgcgggggatttccatgcaaccttgaatggtaaaaatgcctttaagcggatcaacgaattgattaatctgccagaggaaaaaactaatgatttacctttaaaaacttggtcagctcaagatcaattgaagatcaagaacttgaagtttacttatcaaaagggaaccgaaattggaccggtttcattacaagtccaaggattcaagaaaattggcattatcggaatgagcggatctggtaaaactagtttaattaacctgctcagcggctttttgactccggatcaagtgcaaattgaactacaagggcagaaaactacgaccatgaatattcctgcttggcagcgtcaaatgacctatattccgcaggagccatacgtttttactaagagcttgcgtgaaaatattgctttttataatccgcaggcaagtgatgatgaaattaagcaggcgattcatatcatgggtctggatgccttgttaaatgatttgcctaacggacttgatacggtgattggccgcggtaagcgtgtcttgtctggaggtcagtcacaaagaattgccttagcgagagcatttttggatcctaagcgaaaaattatgatcttcgatgagccgactgctcacttagatatcgaaacagaaattgacttaaagaagcggatgatgccattaatgcaaaataaactggtcttctttgcgactcacagactgcattggttaaaagaaatggactatattctagtgatggatcacggtcaattggttgagcaaggaagttatgagcaattgcagcaaaatcaaggctacttctgcaagttaatggcaggaatgagaggtgaaaacaatgatcaataagattccggttttaagagcattaaaaaatgatcgttgggttcgcccatatttggaaaaatatcgtaaaacgttgattttggcgattgcactgggcattttaactttcgtctgtggcgggggcttgatgttctgtgctggctatttaatcagccgttcagcagctaaacctgaaaatattttgttaatctatgtgccaattgtcttaactagagcatttgggattacgcggccagctgtccgttattttgagcggctggttagtcacaattgggtgctcaaaatgacctccaaatttagacaacagctttatgactcattggagcgcgatgcgactatttttaatagtaagtatcagctaggaaatattctgggacttttgtctgatgatgtcagccatattcaaaacttttacctaagaacgatctttccaatgtttgtagcttggggcttgtatgcaattatcgtaattggcttaggcatcatttccccactgatgggcatttggatgttgatcctgtttttcttgattatttttgctattcctatttggtcagtcttaatcaatggtgcgcggcaaagctatgaaaaaacggttcaagacaagctctacgttgatttgactgataatgtgatgggagtagatgactggattttgtctggccgcagcaaagaatacttggccttgcatgtcaatgatcaagataaatttttgcaaatcaacgcgaagatgaaaaaatttgatcgctggcgcgactttgttttacaaatcttctgggtgttggtaattgtgagcctagtaatttggggtgctgccagatttggcgggcgttcaacttattatactaattggattgcggcatttgctttggcattattcccgactgttgaggcttttgccagtttgccgactgctgctcaagagacgaatatctacaaagattcgcttaagcgtttgaataatttgccagctcctgatcggactaagcataaaccaatcaaattaaccgcaccgtttaatttagtattaactgatgtgcattatgcctaccctcaaactaataaagaggttttgcatgggatcaacttaaatatccatgatggtgaaaagattgctattttgggtcgtagtggtgcgggtaaaagtactttagctgccttgctcagaggtgatcgggtaccagctaaaggacacgtaactttaaatggaattgataccagcaagtttggcgatcaaatgtccaattactttagcatcatcaatcaaacgccatatttgttcaataccacgattgccaataatttgcggctaggtaatgaagatgccacagatgagcagctatgggacgttttgcgccgagtaggtttggccgagatggtgcaaaaattaacggatggccttgatactaaggtggatgaggcaggattacgcttttcaggtggtgaacgccatcgtttagccttagcgcgaatcttactgaagaatacgccaattgtcttacttgatgagccaacagttggcttggatccaattacggagcaagctgtaattaatatgtttattaaggaattatccggtaaaactttaatttggattacacaccacttgcaaggaattgatcagatggatcaagtaatttttattgaagatggacaaattaatatgcagggtacaccggaaaaattatggcagacagagccgcgttatcgtgaattgaaaaaggctgatttaggattatagaggttcattatgctaacgaataaagtgccagaacaagatgtgcatgacctatttactagggtcgcacctaagtatgatttgatgaataatattgttagtttagggattcaaaagagttggcgtaagaaatttttacggcagttagatttaaataaaaattctatttgcttagatttgtgttgtggtagcgctgattcaactattgatttgactaaaaaagctaaattagtgactggtctagattttaaccaggagatgctgaagattgcccaaaaaaagattcgtcaaaagcagctgcagtccaagataaagttgattgcaggggatgcaatgaatttaccttttgcggccaatagctttgattgtgtaactatttgttttggcctgcgtaatgtccctgacgctgttaagacgattcaggaaagctaccgcgtacttaagccgggcggacaatttgctgttttagaaatgtctcagcccactaatgcattagttaaattgggctggcaagcttattttaaaatttttccgtattttgctaagttgacacacggtaatatcaaggactaccagtatttgtcaaaaacaagtaaagaatttctctcggctgagcaattaaaaaagctacttgagcaaaatggttttactcgagtagcggttactaagttaacttacggtgcaggtgcgattcatttgggacgcaaagactaaagcgttcgattgactaatttacgcgtcatctttttgagcaagacggtcgcattagtttgcggcagttgggctaagttagctaatgcccgattagtgtattgttcagctaaggcatgagtttcttcaatgactgagctgtttagcaaaatcttttggatttgttcgatatcgtttttgctcatttgtcgctttttttcaagtagcggtactaattgctctcgtaattcctttttgctaagagctagcagaataggtagagagtagacgccggtagtcaaatcttctagcgttggcttgttcaggtgcttactgccagtgtaatcaagaatgtcgtcaacaatttgaaaagcaatgcctaaattttcaccaaaggaggctaaagcttgagtagtttgctcatctccattgccaaaatggcttccttcttcggcagctaaacgaaaaagtgcagctgtctttcctttaacattagttaagtagtcgttgaaatcttggcttaggttaaaacgttcagccatttggcctaattcaccagcaagtaaatggtgcattgtgtgagcatttttgatcatgtaatcttgttcggaaatggcgttcaaaattaggtcaaaaaagtgcgtaaaaagcaagtcgccagcgtaaactgcggtgtctttgccaaaacgggcttggatgctaattttaccgcggcgctcgtcagaatcgtcaatgatatcatcatgaattaatgaggccatatgcaaaatttcgattgatgaggcaagttgaataatttgttttgatacagtttcttttttgctagcaatttgagctgacaaaattagtaaactaggccgtaaatatttaccaccgttactagccatttcaaggagtgcatcttgcaagtctgaatatggagtgcggatggttgcctgaattaattgattaacttcttcaagcggtttacgaataagtggatatttttgccaaggttgagagttattcatgatagatttccttataatagagttaacagaatagtgatcctttgaaaggatgtggatcgatgtcattaagtgtatttttagaattaattgagattaaagcaaaaaccgctagtgtcattccctttttcttagggatgtgctacagcgtgtattattatcaccaagttaactggggatttgccctagtcttcttcattgcaatgctactatttaacatggtagtagatatgtttgataactactgtgattattatcacgcagatagcaagaattaccaagagaagactaacattatcgggcgagaaaatatttcacctaatttagttctgggattaattatttcctttagtcttattgcaattttattaggtttgtatctagtcgctaaagtaggcttgcctgtattgtggatgggcttgttctgttttatggttggttatttatattcatttggtccgcatcctatttccagcttgccactaggtgaattgttctctggtttcacaatgggcttcatgattgtactgctcagtgtttatatcaatagttttcaagcttttgattggaactggatcacaatcggtcgtatcttcttattagctttagctgataaattatggatttctaatttaatgctagctaataacttatgcgatgcccaagaggacgaggataatcaccgcaccacaattattcactttattggtaaaaaaggtggcttgattgcttttagtatcaaaaatgttttagcatttttagtaatcttcctcctaccgtttttgggaattgctcctaagacggtttggttaacagtaataattgtaccgttcgtttataagcagaacaagatcttaattggtaaacaagttaagacagagacatttatcacaggagtaaaaacgttgctagttggttcactgacttacttaataacttactttttaggaattctattttagagaggttgaaaattatgaaaacagttgtagttttaggtgctggttttgccggcttgaaaacagttgtcgctttgcaaaagaagttgcgtgaacaagttaagattatcttagttgaccgtaatccataccactacgaaacaattcgcttatatgaagtggctactggtgaaattccctacactgggatgtcatatgaaattaatgatgtaattaatccgaagatgactactgtgattacggatgaagttgaaaaagttaatattgctgataaaacagttgagttaaaggatcatgctccacttaaatatgactattgtgttgttggcttaggctttaccttgagcaatatgggcattaaaggtgtaaccgaaaatgctttgccaatgagcaatgtaaaacaagctgaagctattcgcgaccacctttatgtcgaaatgaaagcttatcgccaagaccatgattctaaacacctgtcagtagtaatttgtggggcaggttttcaagcaattgaattaggaaatgccattgcaaaggttcgcccagaactagctcaaatggctggcgcccaaccagatgaaattaccatcagaatgattgatggttcgccacgtcttttgccaatgttccaaggtaaattgcttgattacgctttaaacacaattaagaaaaataaagtcgaaattattaagccagcttatgttaatgaagtaacctctacctcggttttgtataaaatggctaatgaaaaagacaatgctgagctgcaagaaattaaggcaggtactagaatctggatgatgggctttagtggcagtccagtaattgaggcatctggatttaagaaccgtcgtggtcgggtcatggttggtgatcatttaaccgcgccagaaagtgatgatatctacgtcttaggcgatgtttcaagcgtcatggttcctggtaagaaatggccatatcctaacactggtcaattggctctttcaatggctaactacgctgcaaaagatattaagagcagaattatgggtcaaactagaccggataaatatgcttaccatgacttaggtgtagtagttaacttgggtaattcagaagccgcaggattggcaatggggcatgcttttaaaggatactttgcagcaactcttaagaagattaccattgataagtcggttcttgaaactggtggtattaaagaaacaatggcgattggtcaatttgacttctatcactaaaattgaaaataaaagagaataaaaaatcacttcagtttgatttgatatgaaccccaaatttgggacatattattgaactgctttatttaaaaccatatttcgatattctatcggagtatggttttttagtactgttttaattctttcatgattgtagtaatgaatgtattaggactaaagtgtgaagttgcgccattttatgtcacaccaagaagacctgctattcaccacactatgggtggcttagtaatcgacactaaggctcatgttttaaataaggacggtcaaatcatcgctggtctttattcagcgggtgaaaatgctggtggtatccatgccggtaaccgtttaggaggaaattctttagcagatatctttacctttggtagaattgctgccaatactgcttatgaggataagcatgttaccgatgttattactggcgcttcgcagaaataaagatagagtataaaaaaatacagatatatcaatttaaatattggtatgtctgtatttctatttggagtcattttttccttaccttcgaataaaaacccatgatttctaattcttactaacaaaaataatagtaacttttctaacttcccaaaaaattttgcgacttttttgcgtaataaataatagaggataaatatcctcaaattatttaaggaggactttgcatgagcaaagagaaagaactaaatgtgtctgaagcattaggttttacggatgatttgatgtttcagaatgttatgagagatccagagatctatcgtatgtccttgaatgaggttctaccacatttggacattcaagatatcactgtatgcacgcaagaaaggattgcttttaaccaagaagagaaagtttcgattcttgatgtcctgattacggatagcagaggcaggcgttacaatgtggaaatgcaggtcgcgcataaagcagacatggataaacgagccaggcaatacctgttcaagatgatggaagatggctttttacgacgaaaacaagaatatggcgagctgcacgctgcatatgtaatttttattctgccgtttgatcccaaaggaaaaggcttgaagcgatatacttttgtttatactgctaaggaagacccatcagttgaattaaatgacgattctgcgataatatatttaaacacaaagggaacaaaaggcaagatcagacctgagcttgatgacctttatcgcatgattgaaggcaagccaacttcaaatggaaaactcgtcagtcgaattaaaaagtcgatgaacaattatcgtagaaccgaagaatggaggcaacacgtcatgaacacagaagaagtagcagaagcagcaaagcagcttggcatggaagaaggcatacatgaggcaactgttgcagcaatccataaaacgattaacatgcttagaaggatgaagcgcagtcccaagcaaatcttgcaagaattagaacaagattatggcaatgaattttctgaagaagaactagcagactttgtgaaaaacgcctagtcgataagatataatgatagctgtgaagctatcattttttagataacgggggcttgatcatgaataatcctgaagaattacaacattttttagatgttctgctaaaagagagtaactttaccagagcagctaaagaattatatatttcccagccttatttaacgcagctaattggacgaattgagaaaaaattaggcactaagatcatcaaccgagatgagagaccctatacgttaactcctgcaggtctaatttactatcaatatttggagaatgtttcatataataagcagcaattagggcgcaagctggaggcatatactcatcctgaccaacagataattaaaatcggcattttggagagcttaggtacatatttattgccagaaattttgccgcaatttttgcaagaaaaccccaacgtcaagattcagctatttgaaaatttccccagagaaaatgaaagaagactgcttaatggcgagctggattgttatattggtcagacgccagaagcacttgactcgagtttagatgtggttgcgggtggcgaggaacgctattacgtagtgatttcgccagcctcaccatattaccaagcaggaaagtttatcttaaattcggatgaacttgatctaaaagaggtactgcaggagcctttagtgttgagttcacctggttcagctatccggcatcaagttaatggcttatttcagagattaagactcgaaaaaaatattgtgatggagtctaatagtattattactgcaactaacttggcaattcacggcgtgggtattaccatttcttcggcaagtattatcagaagaatggaacaaacgccaattaacttgttgccactagatcgaaagttaatggatgttgtctttttcattactagcaaaagcggggaaaagtcgccagcgttagaaaacctaatttcaatttttcaaaagacgcatttacaagcaaaaataggataaagaaaaaggcatcatgcgatgccttttaaattgctttgatttctattgttttcgtttcatgtcgatcatcttcggctcaatgtagaagtgatagaggaaggaataaccaagcagtacaaaggtaattccttcaatccaaccgccgaatacatcagatggatagtgcacgtggacgaaaattctggtgtaaccaatcatcagtgggaataaagcccaaataataatcaataaagtcttccagaatttgcttctcactaaaagaatggttaggataatcaaaacaccaaatagcgccgcgctaccaactgagtgccccgatggaaaactataaccatccgcataaactaagtgcttgaccgttggacgctgccgcattgctgcgtgtttgataatccaattatagccattagcacagatcatgacaccagcggtaaaccaagcgtatgcatattgcttaaagaccagtaaaactatgaaaacaatgattgtttcaattgtgatcacgcttgtattgccgagattagtaaaatctttagcaaaagcgacattagctggattattgttgcaaacaatgttgaccacagcattatcaaaattgtgaataaattgtgagccggatgaaaccagtgcggcccagacagcataaataaccacgaagcagataccaggtattaaggtgtccttaggtggtcgtttcgtattaatcaaaaaagtactcccctcttgaaatttatagcatttgtggtaaattataatcattatctataagaaaataaaggtcgagaagtagtaacaaggatatttttttcagagagagactggttggtgcgaagtcttagaataaaattgtgaactcgtctcttaataaaacctagcgttgccatccgcgttaaggagcaattaagtgtcacaattttgtgaaacttaggtggtaccgcgatgattcgtcctatgattttttcatagggcgttttttgatagtaaaggagagtttatcttgtataaccacaaagtagttgaaaagaaatggcaagattattggtcaaagcatgatacctttaagacaggtactgaccctgataagaagaattattatgcattggacatgttcccattcccatctggtaagggacttcacgtaggtcacccagagggctataccgcaactgatattgttgcaagaatgaagcgtgcacaaggctataatgtgcttcacccaatgggctgggatgcatttggtttaccaactgaacaatatgcattgaagactggtgaagatccagaagttgttactaagaacaacattgctaactttaagcgtcaattgaacaagttgggcttctcatatgattgggaccgtgaagtaaccacttcagatccaaattactacaagtggacgcaatgggtttttgaacaaatgtataaaaagggcttggcatatgaagctgaagttcctgttaactggtcaccagacttaggtactgttgtggctaatgaagaagttatcgatggtaaaactgaacgtggtggctacccagtatatcgtaagaatatgcgtcaatggatgcttaagatgactgcatatgccgatcgcttattagaagaccttgatgatttggattggccagaacccgttaaggaaatgcagcgtaactggattggtcgttctgaaggtgcgcaagttactttcaaggtaaaagacagcgacaagacttttgatgtctttactactcgtcctgatactttatttggtgttagctatacagttcttgcaccagaaagcaagcttgttcaagaaattaccacacctgaacaaaaagaagcagttgatgcttacattaagaaaattgaatctaagtctgatcttgaaagaactgatttgaacaaagataaaactggtgtcttcactggtgcctatgcaattaacccagttaatggcaaggaagtgccagtttggatttctgactacgttttagctagctacggcactggtgcagttatggctgttccagctcatgatgatcgtgactatgcttttgctactaagtttggtttgccagttaacccagttattgaaggtggcgatattgaaaaggaagccttcacaggtaatggcaagcacttcaattctgagttcttagacggcttggataatgaagaagctaaaaagcgcatgattgaatggcttgaagaccataactgtggtaagaagaaggttaactacaagttgcgtgactgggacttcagccgtcaacgttactggggtgaaccaattccagttattcactgggaagatggaaccacttcattagttccggaagatcaattaccacttcgcttgccacatgcaactgacattaagccatctggtaccccggaaagtccacttgctgacttgactgactgggtaaatgttgttgacgaaaacggtagaaaaggtaagcgtgaaaccaacacgatgcctaactgggctggttctagctggtactacttgcgttacgttgatccacataatgataaggaattagctgactacgatttgcttaaaaagtggcttccagttgatctttacatcggtggtgcggaacacgctgtgcgtcaccttctttatgcaagattctggcacaaggttctttacgatttgggtgttgtgccaactaaggaaccattccagaagctttacaaccaaggcttaatcttgaagaatcacgaaaagatgtctaagtctaagggtaatgtagttaaccctgatgaggtgatcgatgaatatggtgcagattcacttagaatgtacgaaatgttcatgggtccacttgatgcatcaattgactgggatgacaatggtcctgcttcaactaagaagttcttggaccgtgtgtggcgcctctttgtaaacgatcttgatttgaaggccattccacaagaaagaatcgttgataagaatgatggtgaacttgacaaggtttatgcagaaacagtcaagaaggtaactgaagactttgaatcattacactttaacactgcaattagtcaaatgatggtcttcatgaatgctgctcaaaaggctaagaccattccacgggaatacgcagaaggctttgttaagcttttagctccagtggctccacatatgatggaagaaatttggcaagtctttggtcatgatgaatcaattacttacgctaagtggccaacttatgatccagctaagttagttgagtcaactgtagaaattatggttcaagttaacggtaagcttcgtggtaagttccaagctcctaaagacgctgcaaaagatgacttgcaaaagcaagcaatggaaattgaacacgtaaagaagttcttggaaggcaaggacgttaagaaagttatcgttgtgccaaacaagattgtcaatattgttgctaaataagttagattttcctaaaaaataataagaatacttattatttagatttattgaattgattagttgagacttttattgggaaaattttaatggaagaaaataacttaaatagcaaagatacacaaaatacttttctaaaaggttccgcatggatgacctttggctcaattgcctcgagaattttgggtgctttgtatattattccgtggtatgcctggatgggctcctacggcaatattgccaatgctttgactgcgcgtagttataacatttatacaatttttatcttaatctcgacagccggaattccaggagcaattgctaagcaggtagctaagtataatgcactaaacgaatatgggattggccgcaaattatttcgcaaaggcttaattttaatgaccgttttgggtattgtctcagctgcgatcatgtattttgcttcgccgcttttagcttcaaatgggagtcaaagtgatccaagacaggttgcagttatgcgtagcttgtcttatgcgattttaattattccaattttgagtatcatgcgaggctatttccaaggttatgccgatatgatgccaagtgcgatgtcacagtttgttgaacagtttgcccgggtagtctggatgttgctaacggcgtttgtaattatgaaactgcaacatggttcatatgttcatgcagttattcagtcaaacttagcggctgcagttggtgctttatttggaattggcttattaatttggtttttgttttctagaagaaaacaactagattatttggttgcccattctaataatcgcttgcgggtctcaacgactgaattatttggtgaaattattgcacaagcaattcctttcattattattgattcaggaattaccttattttcattggttgaccaatataccttccacccgatgattgccagtctagttcatgctagttcagatacaattgaggactggtatgccttgtttggtttgaatgctaataagttaatcatgattattgtttcgctggccagtgcaatggcggtaaccgcgattccacttttatcagcggcgcatactaggggagactataagagcatttcaaagcagattgctaatacgatggacctatttttatttgtaatgattccagctgcttttgggatggcagccatcagtaggccaatttatacagttttctatggtccagatctattggggagcaacgtactatatctgtcgtcatttaccgcgattagtttaggattatttacggtgctgatggcgattttgcaaggtctttcgggaaatggactggctatcaagtacctggttttaggattgattttaaaagggatcctgcaatatccaatgattttcctatttaaggtatacggtccgctggttgctactaatttaggtttattaattattgtggcactttctttaaaacatttggaagtgcagtatgattttaatttgaatcgaactagtagaaggctggctggagttacagcattttcagttggcatgttccttgtggttaaattatgtgaaatgggactaggcaagtttctcaatcctgatcatagatttaatgcattggtgctagtgattgtagctgtaggtgctggggttgtcttttatggcttggtgacattgaagacagggttagtccaaagcgtcttaggtagtaaggtagaaagtattttagttagactacatatggataaataaaagaaaatcaaactgttgtgatggcagtttgatttttttgttataaaaaattgcggctctttgtcaaatcttactgataaggtgtcaagtctaatttttcctggtagttgagtaaatttttggccgggggatggcttacttgagtaagtttttgtgcaatttctaagtgaatcaaccctaattgtcaaaaaactgccactccctcttgcaaagacgataattagtgttattatataatgcataagaaacgcaagaaatgtgtataaaaacaattatttttagcaaaggaggcaaaaagcatgattaatctgactgttaatacaatcaggcttagcggtgtcgctgcaagagcaaaccgcgtcatgttttaactgtcctttagacaaagtgaatcaaagataatttaacagcacagtattaagtacacccggtttatcggcggcatcgttaactgaagattttttgttatgcgtgttagctaatgaggtattaagatgaacaagggtaagactttaatgactggtgctgttatttttatgtgcgggagcatgctggcggcctgcggcaagagccaaggagcatctgtcaagcagaatttaaactggatgaccagtgcgaaaatcatcaccatggacccatccaaagccaccgacaccacgtccttccagcagattgaaaatacgactgaagggctctaccagctgggcaaagacagcaagccggttaaggtactggtcaagaagacgactgtcagcaaagacggtctgacctggacttttgaccttaagaaggggactaaatggtctaatggcgaaaccgtaactgccaaggactttgtctattcctggaagcggacggtgaaccccaagacagctagccaatacagctacattttctctgggattaaaaatgccgaccagatcgttgctggtaaaaagaaggccgatacgctgggcgtgaaagccgctggcaaatacaagctgcaggttagtctggaacataagattccatacttcaagcttttgatggccttctcagtctttttcccagaaaaccagaccgcagttgaaaagtatggctcaaagtacggtacgtcatcaaaaacgaccgtttataacgggccattcttgcaaaagggctggacgggctccaacttgtcctggaccatgttcaagaacaagaactactggaacgccaaagccgttaagctgcaaagcatccactttgccgtggaaaaatctccgtcaacggcctactacctctaccaagatggcaagctggacacggcaagcctgagctcacaagcctccaagaacctgcaaaagtcaccagactatgttgtaagaaagaccaacgggacgacttacttccaatttaacctgaaaatgaagaagttccagagcaccaagatgcgtcaagccatctccatggccctagacagaaacgccttagccaagaccttgggcggcggctacacgggctctaagaactttacggcagctggcatgaccaaggtgggtgacaaggattttaccgacctctctcaaaccaaggaaagcttgctagtaacgggccaccacaagcagctggcccaaagctactttaaggaaaggttgaaggaacttggcttaaagaagctgtcctttacggtgattacggcacacgtccaagtccatcggcgaatacttccagagtgctcttgaatcaacttttggcaagcaaatcgacgtcaaggtgcaaagcctgccaaccaagtcccaatttgccaagatggactctggtaactttgaagccacgatcagcggctggaatgcggactttgccgaccaaatttccttcctggactgcatgacctctactaatggctacaactcaggcaagtggatgaagctgctggcaaaggctgaaaacaccttgctggttgatcagcggctcttactacttcgaacacgtctacattgccaagtaagccagtaaaaaatgtattatcatgctaggtattatgtagtagaaagtgaagaataaagcgtaaattgctataattaagatagaaataagggaaaatcttaattagtgaaggagcgaaagataatgaaagactcaaattcaccaatttacaacatttggatggtggttctgctggttgccgcatatgtctggccaatctttggcttagcaccagccatctacctctttatcaagcgcaaggatgagaatctggtccctttgaagaattggattactctagccttgatctggcagattgttttgtggctgctcttgattttggttgtcgtctccttctgggtcggcgcctttgcggtcaaccacggttaactaaataactaattgaatagctagataaaagtcagtggatgccactggctttttgtctgcttaagcaaatgtcataactatatcactatttatagccttgaatagatttaatcggttacataatgcatcacgcaggtgatatctcacaaaaaattaacaaaagcatcaggttcaaagattgttaagccgatgttaaatagaactagcaagggtgaaagcggtacatttttttctttgttaagctaatgtaaactaagaaaaataacgttagaatattaaccgattttcgaaaaatggtaaagatttttccaaaatccggccagaatttaaacaaagttaagtattttactttgatttaacatttccccctgaatgtatttaacctccattaattactatttacttagtaagaattcaaggaggataattatgttaggcaagaaaactagagtagtggttatcgcacttgctctactggctatagtcgtcggctgcgttgttggcagttcaaaggcagacaccaagggtgtctctgggactgttaacgctgcggggtcttcagccctgttgccgctagtccaaagcgcagctaaatcattcatggatgaaaatccagacagcgtgatcaacaccaacggtggtgggtcaggccaaggtttacaacaagtctcagatggaaccatcgacatcggtgactctgacttgttcgcagaagaaaaattagacaagaagtccgcatccaagctggttgaccaccaagtggccatcaccgcgattgccccaatcgtcaacaaggacgccggggttaagagcttaaccacccagcaattgatcgatgtttacactggcaaggttaccaactggaaccaagttggcggcaatgactgcaagattgttttgatctcacgtcctgcttcttcaggtacccgggcaacttttgaacaatatgctttaaacaagactgccagtcgttcaaaccaatcactggaaactgacgactccggtactttgatccaaatgattcaaagcgttgaaggggctgtcggctacgttgccttatcatacttgactggtaacccagacgtaactgcagttgccatcaacggcgttaagccaactctggacaacgtttacaacggctcatacaaggtttggaactacgagcacatgtacaccaagggtcaaccaaagaaggctgctgttaaggcctttttaaagaagatgttaagtaaagaatacgaatcaaaggttgaaggcatgggctacggtgttgcttctaagctttcagacaaggctaagaaagaacacaagtaaaaggagagtgatttttcatggacaaggtagttcaaaaagccatcgctagcgataagcgctggcgggcagtatacattgcttgcgggctcttgattgttgctttgacgctcttgatgggggcattcctgctctaccaaggtagtcaaacctttatcaaggctcaccacagcatctgggaattcctgtttaccagcgactgggcaccgcttgacaagaccggcctgtttggcgggaaagtcggtgcagcagtttacatcgtaggttctcttgaaacctgtttgctggccctggttatctgcttgccatttgctatcggctcagcagtttacatgacggaaatctcaccaaagatcggtgaaaagtacttccgtccagctacggaaatctacgtttcaattccatccgttgtttatggttggtttgggatgaccaagctggttccattgattaaaaatattttccatccagccatgggtgggtactcagttttggccgcatccattgttttggccatcatgatcttcccaaccatcaccgcggtttccgctgacgccattaagtcagtgccaatgagctaccgtgaaggtgcttacggtttaggcgcaacccgctggcaagtaatcggcaaagttgttttgccagcagcttcaggcggcatcttgaccggggtgatccttggcttggccagagcgatcggtgaagccttagccgtagccatggttatcggtaagactcgctcatttgcggcaaaccttttgtcaccaaccagcaacttgacgagtgccatcgcagccgacatgggtaacactgcccaaggcggggaatacaacctggctctgtggaccatggcgctgctcttgttcatcatctcaattgtcttgattgtgctcattcacaaactggctaacggaaagaaggataaataatgaaccgtgctaagaaaaaagatcggtttatgaccggcgtcttttacgccatcggctggctgatgctagcattcttgctgtatttgacatttaccattatctttgatggcttgaagggctttagcccagacttcttaggggctgccggcaacgggatcttcaaccaattctttaacactctttacttagttttcctttcgctcttagtttccgtgccaatcgggatcggggctggggtttacctggctgaatacgccaaggaaggcaagctcttgaccatgctggaagtaagtatcgaatcactttcttctctgccatccatcgtaatcggtttgttcggctacctggccttcatcatgtggacgggaatgagctggaacatcgtggccggggccttgacgatctcaattttgtcaattcctttgatcactactgaaaccaacaatgcaattcgtgccttgccaattgaatacaaggaaggttctctaggtttaggtgcaaccaagtcagaaaccattagaaaagtcttgattccagctgctatgccgcaaatcttgactggggtcatcatggccgctgggcgtgggtttggtgaagccgccgctttgctgtacacgtctggtcaatccacttacatcaactggcacaacttctggaagattacttcacctacttcacctttgaatccattcagaagtggtgaaactctttcactgcacatctgggtcatgagaactgaaggggctttgaaccctaaggcaacccaaattgccaactttacttcagctgttttagtagtactcgcactgctctttactttagttacctgccgcatttcagacaagatgcgtaagcgcaataacggaggaaattaataatggaagacaaaattactatcgaaaacttgaacctttactacagtgatttccacgccttgcatgaccttaacatgcacattccaaagaatgaaatcacggctttcatcgggccatctggttgtggtaagtctactttgcttcgctgcttgaaccggatgaacgacctggttgaaggctgccggattgacggttcagttaagttagatggtaccgacatttatggcaatgaccttgacgtcactgttttgagacagagagtcggcatggtcttccaaagaccaaatccattcccaatgagcgtttacgacaacgttgcttacggtcccaagatccacggcgtaaccgacaagcaagaacttgacgaaatcgttgaaacctcattaaagcaagctgctatctgggatgacttgaaggaccgtttgaacaagtctgctttgggtctgtctggtggtcagcaacaacgtctttgcatcgctcgtgccttggctgttaagccagaagtcttgctgatggacgaaccaaccagtgcccttgacccaatttcaacttcaaagattgaagaattggctctgcaactgaagaaggactacaccatcgttatcgttacccacaacatgcaacaagccgtgagaatttctgacaagactggcttcttcttgctgggtgacctggtagaattcggtgaaactgaccaactcttctccatgcctaaggatgaaagaactgaaagatacattactggtcgtttcggttaaagaccagtaataattagatagagtaagaaaggcagaaacaatgactagatcaagatttgatgaagaattggacaacttgcaaaagtccatggaagacatcggcaagctgtgccaggaagccattttggaagcaaccaacaccttgtttacgggcgactaccatgaagctgaagactcagtcaacttgcaccgccgcatccacaagagcgaacggaaaattgaagacagctgcttgcgcctgttgatggagcagcagccagttgcgactgacttgcgggtgatcagttcttctttgaaggccgtttacgacctggaaagaattggggaaatctctgctgatattgcagaactcgtgttaaatgaacacctgtccatcgccaatgaccagctgaaccttaagtccatggtgcaaacctcaaccagcatggttgatgatgccgtaaccgccttgtccaccaagaatctggaactggcgcaagcggttatcgaccgcgacgacattgttgacgatgactttgaccatgcccgagaaatcctgatcaacaacttcagcaaggatggcaatccagaatacctgatcaacctgatgatggttgccaagtacttggaaaagatcggtgaccacgcggtcaacgttgctaagtggaccaagtttgtggcaactggcaaggccggaagataagtcttggaaagtttgctaaattaatattcttcctgatctatctgcatagcaaatgtttctaagctataattagagtagctatttgcagatagattagggagaatttttttatgactgaaatatggtgtgtggaagacgacgaaagcattcgcgaaatcgaaatgtatacgctggagtcgatgaactttaaggtgcgtggctttgaagacgggacgacttttgtcaaggccctggcggaaaagcatccagatctggtcatcttggacctgatgctgccagatgaagatgggagcgatattttgaaaaagctccgtggcaactcgtcaactgaagaattgccggtgatcatcgctagtgctaagacagccgaatatgacaaggtgaagaacctggattctggggctgacgattacttgaccaagccttttggcatgatggaaatggtctcccgggtcaaggcggtcctgcgccggaccaaccacaagaaagaagacaagatcgagaaagacgggatcaagatcctgctcaagcggcatgaggtttatgtcgatggtcaggaaatcgagctgaccttgaaagagtacggcctcttgaagctcttgatcacccatccagggaccgttttttcccgagaagaaattatggatcaaatttgggaaacgggcttttacggtgaaacgcgcacggtggacgttcacgtaagaaccttgagacaaacattgagtgaggctggtagccatatcgaaacggtgcgcggggtcggttatcgctaccatgaagggaattaatgtttaaaaaaatatttcgggcagtctttttatcaacggcagtcatgctggtctgctcggtggttttgagtgcgctttttttaggcatcgactatgatcacaatgaggtcaacaccttggcttcgcaggccgatttggcagccagcggggtcaacaatgggggaaggaagtacttaacccagctaaaaggagaaaattaccagattacctggatcaatgctaaaggcaaggtactctacgacaacgaggaaaacccagccaagatgggcaaccacgctaagcgcaaagaagttgctgaagccatgaaaaagggcgaagggcaaagcgagcgctacagcacgaccctgtcgacggttacgatgtactatgccaaaaagctgaaagacggcggcgttattcgggtggcggttacgcggaattcgatctggatgaccatcttgcaattgctgacgctgatgctgatcatcttgctgatcgccgtgattgcttcttggttcgtagctaagatgatctcgcagtccatcgtcaagccgctgaaccagttagacctggaccagccgcttgaaagcaagagctatgaagaaatcaagccgctgttaacccggcttgacagtcaaaacaagcagattgctgaccaaatggagcagctccaccaccgggagaaggagttcaagacggtcaccgatgccatgcaagaaggcctgatcttgatagacctgaacgaccaggtcctcttgtccaatccggcggtagtatcgctcttaggatcaaagtcttctgaagttttgccagatgatgttaaaaagatcatcgatcaagacaagcggaccgtccacaccgaagggatcgtggaaagagaagggcgcaacattcaaattagtgccagtccgattttttcacggaaggtcttaaaagggacttcgatcttggtcgttgacgtcacagaagaataccatgaagagcaggtccggcgcgaattcacggccaatgtgtcccatgaattgaagacgccgctgcagtccatcatggggtcagcggagcttttggaaaacaacctggtcaaggaagacgatcggccagccttttaccggaagatccatgaatcttcagctcagctcttgaccttgatcgatgacattatccggctgtctcacctggacgaaaatccggaatttgaagaggtccggatgaacctgaagagtccggtgaccgaggcgatcgaagccttgcaggcgtcagctgacaagcacgagattgagctgaaggcggctttggccgatacagaaatcaaggccaacttccgcttggtttatgaaattgcctacaacctgatcgacaacgccattcgctacaacaatcctggcggccaggtcaagattgcggtcaaggaagtgcgggggcaagctattttgcgggtttctgacacggggatcgggattccgcttgaagcgcaaaaccgcatctttgaacggttctaccgagtcgacaagtcccacaaccgcaagactggcgggacgggacttggtctgtccatcgtcaagcacgcagtacagcagtgccatgggacgatccgccttgaaagtgaactgggcaagggctcaacctttaccgtggtcttcccagctttaaagcatgaagacaaattatacagccaaaattgcttatttgatctatgataaaggtgtcgaaagaaaataagagctctatttaaataacatagacataatcatgggctaagtgtatataaagtgtaatttagaactatacaatatatacgtaaaatcttatgattaaaggtgaacagatattatagccactttttttaggattcgattaatgtaaaaattacacaatgaattaataaaaagcgccatataataagcaaaaaaagtcatttaaataactaaaataaactgagacctaaaagttgagactgtaaaatagtttgtgtaaggatgaatgattccttaaatttatttctttaaacattagaaaaaggagttcctttctcgtatgattggtttgaacaaaaaaaacacatacagaaagaagaactccttcatgaatgattttaccaaagattttgctcaagctctattcaatccagacaaaataaatgatttattgcgcaaagaactacaacaggctgttaataacttgctagaagctgaattgactgcctttctgggctatgatccctatgccagaaatggctggaatactggcaactctagaaatggtgcttatttccgcaaagttgatacgcaatttggcccaattgaagtgcaagtgcctcgggatcgcaacggtcaatttcatcagcacacgctgcctgactacaagcagcactcggatatcttggaaagcatgattatcaagctttactccaagggcgtaactaccagggaaatagccgatctaattgaaaagatgtatggcagccattacagtccagctcaggtatcaaatatttccaagcagatgattccaaaggttgaggcttaccacaaacgcaagctaagcgacaagtttttctgcgtctatttggatgcgacataccttcctttgcgccgagaaacgttgagcgttgagcgtgaagcagtctatattgccattggcattaaacctaatggacataaggaagtcattgactactgcattgctcctagtgagaacattgaagtctggacagagatgcttcaaaacatgaagtccagaggcttgaagcaagttgaactctttctttctgatggtgttgttggcatgaaaacagccttggccaggacttatcctaaagctcattttcaacgctgtttggttcatgtcatgcgcaatatctgcgctaaagtacgcgtcgacgatcgtgaaaagatcatgaacgaattcaaacaggtgcatcaacagacaaacaaagaagaagccacagctgtcctgcatgacttctataccaaatggggcaaggtttacagccatgttatcagaagcttgaaagacatagaaccagatctgctggtcttttataactatcccaagcagatcagagcttcaatttattcgactaacatgattgaatcatttaacaatgtgatcaagcgcaaagctaagcctaaggcagagtttccaactgaacagtcgcttgatgcttttattggtattcaggcaatgagctacaatgaccgttatttcaatcgaattcataaaggctttggtcaggttcaggacaccttagaatcctactttgattaaataaataattaaaaaatcaatttacgagaaagaactatttacacaaaagatttgacagtttctaaaagttagacacttttaggtctttttctacgtaaagtcaagcataataagaagtttggcttcattttttgtttaaatttcaacttaaacatcttttagtgtcgatttatttttttagttagacacgacaaataagcccagatccatatctgatttttgggcttagcgttataatgtacttgatcaattaattacgactaaagtctttttgattatgtgtggctacgttgtaatcatatggttgatcattgataatcagggcataaatggttctgattagtttatgaattgaagcaatagctatctttttgaaccctttggtttgagaggatagctttttgctttcataataatctgctatatgacacggatttgtcttagctgcattatcaatttgtccaatagctcgataaagcaacttacgtgcgactgcattgccatgtttagtaatacttaaattagagtccatttctcctgactgatatctgcctggatcaattccgataaaagcattgattttattaggattactaaatctgcgtaaatctcctaactctgctaaaactctgacagcagtggtctgtgcaaagcctggaatgctttctaggttttctaaatcatgattaggcaaagacttcgctaacttaaccattcttgcgattaaattttctctttgatcacttaaattaagcaatctgtgtgcataatactgcacttgctcgacttctatgctagagcaagatacaactggataagcttgataagctaattcaattaatttatctgcagtccttagagcgtgtttaaaagcaatcccctttaagctcattaaccagttaataagctgttttttatcttctcttcttactaagtcacaatgaggatatcgcacaactatttgccagtaatttttacctttagcagaagaaaataaattttcaatttcaggaaaagtcgattgtagagcttggtgaagtcgatttttagctattaccaagtcacttgtcagctggtcatagaagcggctcaaagcattaagctgcttataagtttgggattcgctttgattaaccggatggcgataaagtctttgaattaaagctaaatgataagcatcagttttatcggtcttgttgtagcgtagccccatattcatctcttttttggctttaagcggattaataacaacatattcatagccgtagtcttcaagaaaagcctgcagtctgcgtgaataaacaccggtagcttcaaaaataatttgcggatgtttagaaaaagcggttaattcatgaagcaattgaataaaaccaggacgattattagtaatggttagttcatttttgctttcaccaattagttcacaaacagtagaagtagacttgcttacatcaattccaaaagtaacttgcataataaaaacctccaaaacttagtagtaaaacgtatttacttaagaaatcagatctaattttctaaactcgacatctagtgtccacattcttcgaagagactattgaaaacttaagtaaaactgccagtttattatgcgacatcaagtgtctaaagacctcagggcatatcgttttaccactactttaattctacaaaagaataaaaatagtgaatcaattatcccgtcggataactaattcactatttagcttagaatgtttactatgtctaaatttaataaagaacaaaaaatagaaatttatcataaatggaaagatgaaaatatctcaatcagtcaattggctaaagcgtacagaatgaatctagctaatttagactatatgcttagattaattgatatgcatggaatagaaattttaactactaaaaaccaaagctattccaaagagtttaagcagcgaactattgaacaagcaatctttggcaataaaccatacttacagctgtctttggaactggggtttaaaagtattggcatgcttaacaattggattagagaatataagaaaaacgggtataatgtcattatcaaacagaaaggacgccctgcccgtgaccaaagaaaagcagaaatctcgcaaggaactggagaaagagatccagcagctgaaagaagaaaacttgcgattgcgtattgtgaacgaatacgtaaaaaaactaagtgccttggaccaagaagatcagaagaaatagctagggtgattacggatctaaggcaagaattcaaagttagtttaaattatgtattagctgcgattgcagagcaccctgagctacctataattgccagaagctcatactacaagattatcaaacgacagcccgccaagcctaaacggtcaaagcttattgctagaatccatgagatttttaatcatcatcaaggccgctatggatatcgcagagtagctttgcagttaatcagagagggctggaaagttacggagaaaaccgttcgctattggatgcataaattaggtcttaaaggcatcaggcgcaataagcgcaaatattcaagctataaaggtactattggcaaaatagctccaaatttaattcatcgtgatttcttcgcagccctgcctaacacaaaatggtatactgatatcactgaatttcatcttaataatgaaaagctttacttatcgcctattctagacggctgcggtggcgatatagtttcttatactatctccaaacatccagatatggatttagtaatgacaatgcttgacaaggcttttgccaaagaaacagctcttaataactgcatttttcatactgatcagggctgtcagtatcaaagccctcgttatcagcgagctttaaaactccatggtattactcaaagcatgtccagaaagggcaactccatggatgatgggctaatggagaacttctttggcctgctcaaaactgaaatgttctatgatcaagaatacaagtatcataatcttcaagaattaactcaagcaatcgaggaatatatcgaatactataacaacgaaaggataaagagcagattaaaaggcttaaccccgaaagagtatcgaagtcaagcctctattaatccaatattttaattgtctactttttacgtctcagtacaaaaattatagagccggttttttagtactgttttaattctatcatgattgtagtaatgaatgtattccttgattgcttgttctaattcacccatggttttgaatgtcttttcaaagccatagaacatttttcgtttaagaatgccaaagaagccctccattaagccatcatctaatgaatttcctttacgtgacatagactgggaaacaccatgatttttaagccaagcttggaaaacagcgtgctgatattgccagccctgatcagtatgaaaaattaacccattgagtgcaggatgcttttgataagcttgatccagcatgtccattacttgttttagtaccggatgacgatttaatgtataagcaacaatctcttgcgtacatccatccataataggcgacagataaagcttctctccattaaggtgaaattcagtaatatctgagtaccaatgtctatcaggaataattgctttaaaatttcgtttaattaaattgggcttgatttttccaacagtccctttgtagcttgaatatttaaatctgcgtctaattgcaatggcatatagatgcatcttggtcattaatcgtttaacacgtttatgattaactataatgccttcacgtcgcaattgggcagtaattctacgatagccatatctatgcttgtgctcctcaaatatttctttgatccgttccataatcttttcgttttttaaatctttatcatctttagttaaagtgtagtaataattactgcgtgataaatgcggaagatcaggattggagttaatcgtatcaagcacaaacttaacggttacgtggagttcttgccttagttgcgtaaccgcagaaactatctcttgtgctgttggttttcggttcttggggagactaaggcgctcaatttttttacaaattcgttctcgacagtaagtcttaagttcttctgtttgaggtcttttatttgcttctgaagctcttgaatctgtttgtctttgtccttcatgggtaggtctgcctttcttgtgattaatgacattatacccgtcttctttatatttgcgaatccaattgtgaagcataccttggctgggcagtcctaaatccaatgatacctgacgagccgtttcatgatcataaataactcttttgatggctttctctttaaattcaactgagtaatctttatagctattatcaagaatttctatcccatgacgttctattaaggcaatcagataaaacaaatttgtacgatttaccccatattccttagcagctaggttagctgatatattataatttttccaattattgtaaatatcaattttgtcttgtttggataatttagtcataataaaaacctcgaaattcttgtccgaatttcggggttcatatcatttgtttctgtagtgccttttttataaatatcaataaattttaggagtgtaataagattttagaattaattatgttcaactgctgttaacgtaatgactccaattaattcaagtgccaaaaatgtaattccaaggatagtaatcatagtgcccatctccttatctaggagataaataattagaatatttatcttttaattcaatcattgcttacactgttactgtaccacataattgcgtattatgaaagcgattacattaaattgggagaaaaaagttgacctccgaagaaatcaacttgtgcccctgccaaggacctatattatagcattcatttattctgcatgatcatcctttttctcagttgagtcaggattttgatcgtcagacttggtgaagtcaccattcatggtattaggacgaccagtttgataatcaactgtgtgcttttcagccttaggtgcgctttgaccaggttcaggcataaccatagcagcaataatatataaggcaacgccaggaaatacacctgtgaataatatcaatgcagcaccgatgattctaacccaagcaggatctagatcaaagtagttagcaataccgcccaaaacgccagctaaaattttattttgtgattttgtaagtcttttttgcatgataatcaactcgtttctaactgttctatctcttttacatatattatacagcaaaggcatgaaaaaagtgttgattgctcaacacttacacataattatgatgcccgctaaaagattcgaactttcactcagtcacctgaacagcgacctgaacgctgcgcgtctgccaattccgccaagcgggcaattttctttggtacatgaataatcataccaaatatttggtaaaatgtaagcataaaatactttaattataaaaaaggatggaaattcatgttttttagcaaaaaaataaaacgtgcagcaattaccacgattgctgcagtatcaattttttcttgtggtgcggtatttgcaactataccagttagcgcagatacaactagtagctatcaagctgatcaagttaaactaaatgtaaagtcagcaattgcaattgatagtgattcaggtcaaattttgtatgccaaaaatgcgactaaaactttgccaattgcttcgatgactaaattagtaacagtttatttaactctgcaagcaataaaaaatcataagctttcatgggatcagaaagtaaagccaacggctccgatagtaaaggtagctaataatgcagaatattcgaatgtaccattaaaactaggacattcgtatacgataagacaactttatcaagcaaccttaattgaatcagctaatggtgctgctatgctgcttggtcaaacaattgctggctcacaaaaggcatttatcgatcaaatgcgagctcaagtaaaaaagtgggggattgaagatgccaagatttatactgcttgtggtttacctaatggcaatttaggtaaagatgcatatcctggtgtaaataaaaatgctgaaaatacgatgtcagctaaggatatggctattgtcggtcaaaaattaatctcggcattcccagaagtattagaaactacacgcttagctcacttaaactttaaagatgctggtcacgtaactaagatggctaactttaactggatgttaaaggggctttctcaatatgatcaagcttatccagttgatggcttaaagacggggactactgatgctgcaggggcttgttttatcggaactgtacaacacaatggtgctcgtttactgactgtagtaatgggcgcacgtcaccgtgacggaacggatccagctagatttgaacaaactaaaaagttaatgaattatgtttttaccaagtatcgtcctgtaacaatgactgctggtagccaaatgaatggcgctaagacaattaaagttgttgatggtgataatgcaactactaatttaggacttaagcaaaagactactatctgggatccagctgatggcaaaactttagtggcatcattgaataaaaaatctgtagaagcaccaattaagaaagatcaaacagttggtgattatcaatttaaatctggtaatgaaaagattgtttcattgtctaatcctaatgggatgaacgtcaaggctaaggcattgtcagctaataacaaggtgaacttttttgtcagaatttggcgctggattttcggaggaagataaatatgactgaaatttctgaagatatcttgaaaaaggtaattaaagaaagagaaagcgatacacataaaggcgattacggtcgtgtactcttgatcggtggtagtgagaactatggtggcgctattattatgtctaccgaaggcgctattaatgctggcacaggtttgactgctgttgcaacacaccctttgaatttagcaccgttacatgcacgagtgcctgaagcaatgtttatcaactggcgcgatgctaagttagcagatttaatcaaaaatatggatgttgtagtttgcgggccaggattaggcatgagtgatctcgctaagcaaattttagttatcttgcgaagatgtacttcagaaaaacaaaccgttgtcttagatgccagtgctcttgatttaattagtcaggataagaacttattgccaactaatgctggccacttaatcttgacgccgcatcaaatggaatggcaacgattgagtcaaattcgtattccgtttcaaacagatagtgccagtattgatgctttaaaccaattgattccagatactaatgcgcttttagtactcaaatcgaatcatactcatgtttataatgggactggtcaaatttttgttaatccaattggcaatccaggcatggccactggtggaatgggtgatactttagcaggaatcatcggtgggatggttgctcaatttggcccaggcgttgaaaccgttcaagctgctgtctatcttcattctttagcaggtgacttgcttgccaaagataattatgtggtacgaccaacggaactttctaaagtattgcctaaattgatgaaaaagtattcagaattggcataaacatgttaaaattctaatagtaaataaatgcatccctagttgagggatgttttttaacgcttcaaagacgaaaaagcataatataattgagttaaatattaataaaaaagaagattaacatatttatgaaaaaaaacattattatcggcgtaactagtatcgttctagcttttggtgcaattatcggcttagctaaggtatgcgcacctaagtctgatgtctcacaagaagctgctacaacgcagactaaggccaaaactaagaaaataaataaaactaagaaaaaacaaactaaaaaagtagataatggtgctttatatcgaccatatagcgatcctaaggacttgcgcaaggcaggcacttggaagaaaaagagtgagcctaaaaaatatcctaagattaagccatatgaaaaggatttgactttgcgggtatcattaaaaggaaaccggacctatttgttaagaaaaggcaaggttttgtataccatgttatcaactggtggaatctacaagaagggcaagtcattgaccccaactggaacttttaggatccaaaatggtcgtggagacagctttttcaattataacttaggtgaaggagctaataattggactagttggagtcctgataacgtgtacttgttccactctgtgccaactaaagctgattatagctataacttaaaagaagcagtcaaattgggaagaactcaaggttcacatggttgtatccgtttgagtgtacctgattctaagtggattatggatcacatcccagatggtacgaaggtaatcattaaaaataattaacaagaacgttgctttttaagcaacgttttttaaaaaattgcagtaaaaaactttgttcaaagcgttcaagattttaatccaactcaagaatggtttttttaaccaaattagtggcagaagccgttttttcctgctataatcatgtttgccaagaagtcaaaagtagtagttattttctttttaagcgagtctatgttggtgcaagatagatactagaagataatgaaggcgtgtttgactgataaaatcaagaatttaaataagcggatactttgtatcaatctgagtggtaccgcgggtttttaactcgtctctttctacatttgtagaaggagacttttttatttagaagagaggaataagatggactttaagaatgaagtagttgacttggttgctagtcaagttgatttacctaaagaaaaaattgctgcattaattgaacgccctaaaaatgctaagatgggagactatgctttcccagcatttattttggctaagactttgcacaaaaatcctgcagaaattgctaaaaatattgcggataacttatcaagtgataatttcgctaatatccaagcagtcggtccttacgttaactttgcgattgaccatgaaaaattagtttcatcgactttgaaggatgttttgactgaaaaagaacattacggtgatcaaaagattggtgaaggaaatgtgccaattgatatgtctagtcctaacattgctaagccaatgtcaatgggccaccttcgttcaactgtaattggtaattcaattgctaagacaatggagaaggttggctatactcctgttaaaatcaattacttaggtgactatggtactcaatttggtaagttgattgctgcctacaagcactggggtaatgaagaagacgttaaaaaagatccgattatgaatcttttccactactatgtaaagttccaccaagaagctgagaaaaatcccgaacttgataatgaaggtcgtgaatggttcaagaaacttgaagacggggatccagaagcagttaaactatggaaatggttccgtgaggtttcattaaaagacttcaagcgaatttataaagaactaggcgtaacttttgattcatacaatggtgaagctttctttaacgataagatgcaaccagtaattgatgaattaaaagaaaaaggtcttcttcatgaatcacgtggtgcgcaagttgttgacatgggtgaaggtgaaaatcctgctattatcgttaaatctgatggtacttcaatttacttaactcgtgacctcgccgctgctgaatggagaatgaaagaatataacttcgttaagatgctttatgttgtaggtaacgagcaagcccaacactttgttgaattgaagactgttttgaaaaagatgggttatgactgggctgatgaaattcaccacgtaccatttggtttaatcacccaaggtggtaaaaagttatctactagaaaaggtaacgttgtcttcctcgatcaagtattaaaggatgctgtttcacttgctaaaaaacaaattcaagaaaagaatccagatttagcagatcaagatcaagttgctcatgatgttggtgttggtgccgttgtcttccacgatttgaagaatgatcgtttagacaattttgactttgacctagaagaagttgtgcgttttgaaggcgatactggtccttatgttcaatacactaatgctcgggcacaaagcgtcttacgtaaggctgctgcgatgggtgaaaatcctagcgaaactgatctagctcttgatgatgactgggcttttgccgtagccaaagatttagcagatttcccaagaattgtagctagaagtgccgaaaagtttgaaccttcagtaatagctaagtttgccttagatttagctaaaaaattcaataagtactatgctaatgtgaagattttaaccaaggacgataaaattggtgctcgtctcgccttagttcaagcaacatcaatcgttttaacggaatcacttagattgttaggtgtcaatgctcctaaagaaatgtaagagaaaaacaatgaaaataagaaaatagcgcttacattctgtgaaaaattgttcatatttcaattattagggtacaataggcatgtaagatatttaggaggtattttttaatggcttattttgacaacggtaatcaaatctttaaagatgctcgtaagaaccattacgctgtaggtgcttacaacactaacaacttggaatggactcgtgcagaattacgtgctgctgaagaaactagaactccattgttgatccaagtatcaactggtgctgctaagtacatgggtggttacaagttcgttaaggacatggtagctgaccaaatggattcaatgaacatctcagttccagttatcttaaacttggaccacggtgactttgaatcagctaaggaatgtatcgctcttggttactcatcagttatgtttgatggtcacaagcttgatactgaagaaaacttagctaagactaaggaaatcatcaagttggctcacgaacgtggtatttcagttgaagctgaaattggtaagatcggtgaaaaccaaggtgctgatggtggtgaattagcatcagttgaagacgctaagagattcgttgctgctggtgttgacaagcttgcttgtggtattggtaacatccacggtgtttacccagaaggctggaagggcttgaactttgaccgtcttaaggaaattgctgaagcagttccaaatgaaccacttgtacttcacggtggttcaggtattcctgaagaccaagttaagaaggctatccaacttggtattgctaaggttaacattaacactgaattccaattggcattccaaaaggctactcgtgaatacatcgaagctggcaaggacttagacaagggtaacaagggttacgacccacgtaagttattgcttccaggtactgaagctattaccgatgctatgaaggaaatgatcggttggttaggtactaagactatcgatgacgaacttaaggatgcttcattcgaccgttcatcattaaacgaagaataatcatttgataattatttaaataaagtctagcgtttgctaggctttatttttttaggcaaatttggtgataacttaattgaacttattataaaagaaatataaaacctgaattgtcaaattaagtgcaacagttaggctatgaggaaatatattgcttgaagagttcttctgctgtgtgatattgaaggattcgacgatgtttgcggttaatggcatcagttgcctgttgaacataagcagctgacttatctttcatgcttttgcctttagggaagaattgacgcagaagtccattgcagttctcattggtgcctctttcccatggagaatatgggtgggcgaagtagatctggcagcctttgatcttggtcatatccgcaaactcagagccattgtcaaacgtgatcgatttaaaccaggcaggatgtctgtcaatctcattttgaagcagccttgggcatgtgcttgcccgatagtcaggaatcttgataactacttcaaagcgtgtggttctttcggtcaaagtcattaaagcaggctgattcttgcgtctgacgcctttaaccagatctccttcccagtgcagcggcgtttttctgtcttcaatctctttaggacgctgttcaatggaattgccaagatgcttcttgtgcaaagcatgaccgctatggccgtgatgacgcttgttcctgcgtcttttgagcttcataggcagatcaatattgcttatgtccagcaagccctgatcaatatagcgatagacagttggtgtgctgggacaagggtagcctggcatagtccttttgaattcaccaacgaattcatcgatgctggtggcatcaaatttagctttaaagcgtctggagagcattctcaaaaagacagcataatgcttcaatggattgcgctgatagcagtttttgcgacgcttctcataataaatctgtgcagtatcagcgtaatagtgctcatacaataaatagctgctgtctctttgcaggacacttccgcgtttgatttcgcgactgattgtcgacttatggcagccgacttcttgagcgataacagtacgggaagttatgccggaatccagcattgcttgaatttgtccacgttgtacgctggttaattgatgatagtgcttagaaatgctagaatttgaattggtcatgaagatcttcctttcttgatttttcgtcacttcaagtttaggtcttcatggcctttttgtttaacacttagtgttgcacttcaattttaaatccgggaaagaaatataaaataaaaaattgaattataaagaaagtataaaaagagacttttatggaagcaaaaatgttaaatccatttatgcctaactttggtcgttttcctaaaattattatcgatcagcaagaagctttaactgattatttaactgggttgcaaacacatgatgctaagtatcaaacttctttagtttatgtcacaagaggatcaagaaaaacagttttccttttaaatgttcaaagatctttagaagagttagataattggatatttattcgtttaaataatggtcaaggagatttgctttttcaattaatgcatggtttgcaacgagttgcaggtatttcgttagttgacttgttaaaaagtgttaaaagtttgaatattatgggaaagggaattactgggcaagcactacaagaatcacagcaaattgattatgatgagtatatttcaattttgctaagtcgtttaaaaaagcagggtaagtcaattctaatcggaatagatgaaattgaaattagtgacgatgttcgggcttttggctcagaatatcaaacattgattggtgatgaataagatatttcattattgatgacaggattgccaagcagaatatccgaagtacagaatgaataataccctcacgtttttactatgtagtaatcgtgtttatttatcaccgttggatgaaaaaacaatagctaatagctatgagaaagcatttactaaaggaaaacgtgaaattgatttcatggtattggatgaaatgagccgtgcagttaaaggctatgcttatgcctttcaaacgattggttattatgcttggcgatttagtcgggaattattgcagttaaacgaagaagttttgaaacaaacaattcgagctgcaaaaaaggacctttttaggaatgcctatgaaagaatgtatatggatctttccaaaactgatcgcgattttatcgaagcaataatcaaagctggaaccgatcgtgtcacgacaaaacaattgcaagatatcttaaacaagcctattaattacatttcggtctatcgtgcaaggctgttagatgatcaattgattacatcccctcaaagaggagtagtacaattggcgttgccattttttgcagagtttgttgaaaaatctaatttagaacatttatcttagaaaatgagcaaatataataaattatggcaatatatcaaagataataaggctggggactttgagctttcttttgatgagcttggccagcaggctggggttgccttagatcattcctttttgcgttataaaaaagaattaccagcttatggctttgaggtgcaaaaaatttcattgaagaataaagtggtgaagtttcatcagttgtaatgaaagctattaataactaaagtagtagtttgcgataatatcttcaaaattagtaactatgttttgttttagaaaaagactaagatgtaagtaaaaaatgggaggattaataagttactatgaagaaggttttatcttggccagtatattatcaactatcagagatttatacggcgccattaaatgtaatttggtttgtcttgggcgcggcaatgtcgtttcaacaatatcacatgtttaatttgattaacattttactgtgcttagtagatgtttttctgtttgatttagcagttaatattgctgataattactatgattatcttcatggcaaagatcgacattttttgactgatataaatccaattggtcgtctgaagttacctttaactgatgttagaaacttagtgtggattagttactttatttcggcgattccgggtattattttggtttatcgcaccggctggccagtactaataatgggagttgtaggatatttcattggaatattttacactgcgggtcctaagccactgaatgcaacaccgatctgtgaattagtggtatctttttttatttcgtatttcattatgctagtaagcatctatgtcacaatttacggcacttatcctttgacctggaacttagcattaactactctgataagatgtttgcctttaacactcattttctatgctttgcagttagctaataatacttgtgatttgcatgaagatttaaacaatgggcgccatactttagccagttatactggtaaaaaatatgctcttaaaataattaagacgttgattattgcgggattattatttccaattatcgttgttctttttggtttagcaaaatggccattgatctttagttgttttttgttgccaatattatggccaaaattaaaacaattttttgagcatccggataaacaaactacctatttacaaatgattaagtatttatcaacgcgtggtgctagttaaatcgttctagacaataagccaaattataagctaaaattgcaatttccaaccggctttgaaagcctatcagactacgtgctcgattgttctcggcattgtaataggtcagaagcgaaaagtcgctttcaattgttctgcgaatagccatcaattgatgatcattgtgctttttagctcctgtcatatttttacgatatggtgtccaaagttcataacccatttgttttagctgttgatgcagttctttgcctaaatagccttcgtcgccaagaagatagtaattagatggatgggtattttccagcagttcaactgtctccctggcatcatgaactgatgcttttgttacgacataatcaagaatgtaaccgtcatcgctaacaatgacatgaactttgaaaccatagaagtaaattttcttggtggccttataaccaatgttggcataaccgcgaaaaattttagcacgatagtttcgaattggttggcaaacaggtaccggaaagctgtcaatgatcaagaactgtccattcaggtcaacctttttattcatttcttgccgtatctgataaatcaattgcaatagctgacgtgaacgtcgattaaaacgtgagtgtgataaacaattgaaacattcacagaatcttctttgtgattcaattcctgtcttagcttgccagataagtaaagccaaaatcagactgtccgtagttttaatttgatcaatatttcgccgatgagtaaactcagccggtgcatacaaacgataccagtgccgacaaattatcactaaatctttaaaactaacttgtaaatggtggctaaaacgcttaagcttaaggcagttcaatcagatcaggctcttttctattattatacaagttgagtctaacaagattggacttttttattaactaaaacgatttaactagcaccacgcgtatttatcaatatttttcattacatatatagctatttatacagttttggttttagtttagaggaaaattatggctttgaatatcatagatagaggattacactcattgataatgaggggggaaaataattatgtttggcaaaaagaaggataagaattcagaattttcaccagatattatgactttaaaaaatgcacttgaggaagtacgttttacgcccgaagttgagcatgacgcagaattaattaacatgtttgacgaagcaattgataaagccgagaagggtgaatctgttcaaacaatttatggtcgactcagttatcaaattacgcaatatattcaaacacatcatttcaaggcacccaagccagtaactgaattcttacatggaagtactggaagcgtagccacgggattgacttcagttccagtttcttggaatacagtacattaggaattttttatgtgcataaaattgacaaatactgaaaaataattgattaattaaacagagtagcaggtaatactactctgtctttttattgcaaatatgatgtcaaatgcgaaactgtaaaatagtttgtgtaaggatgaatatttccttaattttattttcctgaatattagaaaaaggaatccttttcccgtatgattgatttgaacgaaaaacatactagaaaagagattccttcatgaatgattttaccaaagatatggctaatgctctattcaatcaggataaaattaatgatttatttagacaaaagctccaacaggctgtcaatgacctgcttgaatccgaattgactgcctttttaggctacaatccttatgagcgcgatggctggaataccggaaattctagaaatggtgcttattaccgcaaggttgatacgcaattcggacaaatagaaatcaaagttcctagagacagaaacgttgagtttcatcaacacactatgccagattataaaaggcatactgatgttttagagcaaactgttatcaagctctattccaagggcgtcacaacccgagaaatcgctgatttgattgagaaaatgtatggcggctattattctccagctatggtttccaatatttctaaagaaatgattcccaaagttgaggcatatcatcagcgacatctgtcagataagttcttctgcgtttatctcgatgccacctatattcctcttaagcgggtcactcatgagcgcgaagcagtttatatcgccatcggtatcaaacctaatggtcataaagaagtgattgactactgtattgcgcctactgaaaatattgagatttggagcgaaatgctcaaaggcttcaagagtcgcggccttgaacaggtagagctcttcttgtctgacggagtagttggcatgaaagaggctatctgccagtcctatcctaaagcgcattttcaacgctgcttggtacacgtcatgcgtaatatcagtgccaaaatgcgggttgacgatcgaaaaaaagcactggatgaattcaagcagattcatactcagtcaaacaaagaaatggctgtacaggtgctgcatgaattctatcaaaactgggaaaaagcctacaaaaacgtagttagagatcttagacaggttgagcctgatctgttaaccttttacaactatccgccagctattagagcttcaatttactcaactaacatgattgaatcctttaacaacaggcttaagcggaaaaccaagcctaaaacagaatttccaactgagcagtcgcttgacacctttattggagttcaggcaatggattacaatgaccgttactttaacaggattcataaaggatttgggcaagttcgagacaccctagaatcctattttgattaaaagataaataaaaaagtcaatcaacgagagagattatttacacaaacttcttgacagtctccaggattgcattactatagtttatgtaaattatgaataggtagtaagtaacttatgaatttcaagatattcattgatttaatgaggagaacgaaaatgaaaattttcaacaagaaaaacttattattgtcatctgcagttgttgcagggatgctattcacagttggtactaaggctgttcaagctgatacaaccgatagttcacaacaagcaactacaaatactttaaaggtaaatgcaaatactgcagttccagataagaatttgattacgccagtagctagccgtgataatcaaactcttcgtcaagttgcagaagcaaacaacacttcattaagtgtattggaaaagttgaatgataatattgatccagataaaaccattgctaatggcacgccattatatcttccacaaaatgaagatttgtcaggactatttggtatatatcttagatcagatacttcagttccaagctcattaaagagaaaatattatgatagtctttcagcaaaagagagagctgctaagatgtggattattgcacgtgaatctggtggaaattacaatgcaagaaatggtatctatattgggcgttttcaattaacaaatacttatttaaacggaaattatagcaaagcaaatcaagaaaaaacagccttacgatatgttaagggacgttatggttcatggtcggcggctaaaagattttggcaggctcacaactggtattaataaataaaaggaaagtggaaaaattgaaatttcaaaaattagtaactagtgtattattagtagctagtaccactggtgtattaatgactgcacctaaacgggttcaagctgtagctgataccaatactactgagagtggaaaacccgtcgcaaatattgttaataagcctaacctaacaaaacaaggttatgtgttaactattcaagccccatcagggaagatttatgtagggcaaaagaattacaagaaacaattaactactactaagccaatatctaacgcaaaatcagttagttggaagaaaattaaaaacgttagatttagaattgaaaaagttgcttatgcgacaaaggttataaaatttggtggagcaccacagtatctgcttgtctctaaagataaaaaatatagttgctggacaacgcgttattctattaaatactatttttggaatactaaaaagatgcaacaagtaattaagccattgtctaaattgacaactagaaactcttcaagcctaaagaagattcggaataagcaagattttaatcaagctgtattagctgctaaaagattacctgctaatcaaagaaaagttgtcttagaatctttgaatcaagtgaaaaaagttggcaatattgataaggctgaagataatattttgttgttcagcttttagtgatatttctagcacagatttaaaattaatataaaactgaagttagaagaatttatttaatgttgagggggaagaaattgtgagaagtatatctaaaggcattgtatctttgatagcagctacaatgttattagcagcaggggaagggatagttcctaatactgttaatgcttctatgctagattcggctaaaagtagccagaatagtcaagaaagtagtagatacacttggcagagtgttaagctaacagatggaactgaaatgcaaattcttccagataattcttcaaaattagctggaaagattaaatataacggtcaaatatattcatatcgcattgtttcaaataatggtgtatatactatttatttgaataatgaggaagtatattcagttgatataaataatagccagttacctacgacaagtgtaggtggttttgatccatttattaattttacgtacgcaaatggtaaggtagcatttaaacatgcaggtagaaagtattattatttgacgacagagaaatatagtgcagatacggtaagaagactgaaaggaactactaaggatattattattggtttgcttggatttgttcctgtagttggcccctatgtttctgccggcggttttgcctatactgtttataatgatatttttggaaagaatcctaaaaataaatggtatacgataaaagaatattgcactagagggtatgaatattatgcttggaagacctatacttatactgactctcatagaaaacatctacaatctgttaaatgggagtataaaaaagtattatgagaggaattttaactagtagagttgctagaggcatattagcgtttatatttatattttttacgggttggtctgctgcaagattaatagtacagatagaacgttctgaatcgatatatgactaccttattttgggaggatttagtctagttttaggtattttggaactctatagattaataaatagtaagtaacctgaaaattttagaaaattgaacgttaacgtgaatatcaatataacacgcttagcttaaatagtcttattagtttttataattcagtaagataatcggcaaattggtaatatttagttgtagtcgcttcaaaggataaaaagtattcaacttggattactcaagctttcttgcaatactactacctaaacagcaagtctatgcaaggtgtgattaagccactcaagcgaattgctaatagattaaataccagtctgaagaaggcaaacaacaaacgtgactttaacgctgcaatgaaagctgctaagaagttacgtggcagtcaaagagattttgttttacgttcattgaatcaacttaagaaggatggctccatgaatgtagaaggaaagaacttgttattgtttggcttataaaattaagatattaagtagtaaagctcagcagaattgcttgagctttatttttttgtgaacggcagtcgacaaacagtataatgaacttatatcaaaagcactgaagttatttagaaaagaagatggaaaatggctaaaaaagttacgccacgcttggtattagcgattttgtcggcagggatgctctcatttttaggaatattggatgaaacggccacgacagttacttttccaacgttaattaaagaattttcgattactactgatcaagttcaatgggtaaacacactagtcttattggtaattgcgaccattgtgccaattagctcacagattagattaagaatttcgactaagaaaatttttattctaggagttcttttgtttactttggggctaatcatcgatattttatcaccgcgctttgatttattgttattaggacgggcaatgcaaggagtcggcacggggattggcttaccgttaatgtacaatattatcttggctgaagtacctaaagaaaaactaggctttatgatgggaatcggcactatgattactgcctgtgtcgttgccttagggccagtttttggcggaatgattaccgatgcacttaattggcgctggatcttcattatttcgctatttttaatgaaaaacgcccggaaattccccgtattttaatgcggggatggatagggccaagctgacctaatggtcagctttttttattaaaaaatgaagacatatgttcgactttcctgtaaaatataaatatctaatctacagaaggaggtgaaacacatgaagagaatgagcagtttagcctaccattttggcttgaaagtacgcttttatcctagttctaaacaaaagaaaatcatcaagctaaattatgatgctcagcgttttgtctacaactcttatgtaggacgtaatcggaacaattatcgggctaagggctacttagctgttagacaatatcaagtaatgccttttgccttttctgttcttaataattatgagactaagctagcagaagaagtagtcgccaataatgagttattggctaagccaaagaacattcgcgatgcctatagctttttacgcgttaaagaaattgacagtctcgctattgccaatgcgattcaaaactatcagaaagcttggaacaactatcgcaagcttggtcatggaattccgacttttcacaaaaaacgtagtgattggtcatatcagaccaactgtcagtatcctaaacagacagaagcctttcttgataacgggacagctagatttattgatgctaagcacgttaaattgcctaagctaggcgttgtccgcattgccagctttagaaaattgattaaagagcgtttgcttaatcatatcccaactagaattggcacagtcacgattaaaaagaccgctgacgaccagttttacttatcaatgcaactaggcagcgatattgcctttgttaaggaattgcctaagacgcagagtcaaattggcatcgacctcaatcttgataatttcttaacagcatctaacggagcaatggtggctaatccacgattttatcgcaaaaccaaaaagaagcttgcccatgcccaacgtgtcttgtctcgcaggcagcgcagagctaagaaagagggacgcaatttgcgcttagccaagaattatcaaaaacagcgtctagcagtcgctaaactgcacgataagattcgcagacagcgaaatgacttcttgcaagtactctcaactgcactaatcaaaaaccacgatttagtagttgccgaggaattaagaagcaagaacctgttaaagaatcatgccttgtctcaagctatttctgatgttggctggcgcagttttctgaacatgctggcatataaggcagacctatatggcaaagagttcaaaacaattgatcctaagtacaccacccaaagatgccatcaatgtggcagtattatgggacaaaacggttataagaaattaacgcttaaggatcgagaatggacttgtccaatctgtcaaacgcatcatatccgtgattggaatgcggcagtaaacatcttagaaaaaggcttaggcaactggcagaattctaaaataaaaaaagcagcctaagctaggctgcagtccgctcgcaactcgcggactcaaaaggctttggtaattagacgacctctatcggcaatagtcaaaagattattgttggtaagtcaagtccgtatctaagcaagttggtgttctggttagcgcaagctaacgagccagccaccaagccccagaatttattctggggtagttgacttatcttgagtctatttacgggaagctattcaattcggcagattaatccgcttgaaaaagtgaagttcaagtatgtgcaatggctatctttggctattgggctggtctgtttaatgctgggctttacacggattgctaaacattcatttttctcaattcaagttttgggcttcttaattctaggaattattagtttattaatttggctaaaaatatcttggtctgataaggcggctttgattagtccgaaactgtttaaaaatttacgctttagtatgcagctaatagcttattgttttgccaaaattgcaacgctagctttgggcttcatctttccaatctatgttcaggctgtcaatcatggttctgtttcattagcaggctgggttactttccctggtgcggtaattaacgcgctaatggcggctgtagcgggaaagctgtttgataaaaagggtgcgcggctgccgattattatggggataatcgctagtttgattttgatgaatgttttagccccattaagcaacctggcaattgtcttgttatacgttctttattatggcggatacgggatgtgctttggcagtttgatgaccagcggtttgatcactttaggcaaagaaaatcatgcacaaggtaatgcgatttttaatactttgcagcaattttcaggtgctttaggaacagctttagctgagaccttgattgcgctagcgcagaataaatatctgactaatggcacagcagtcggttctaagtggacatttatggtattactgattttgataattattaatttgctcttggctcttgcctttgtgccgaagaagaaatgaagggaagttcagcgaaagctggacttttttaatttaaaaatatactaactctaaatacgcaatatttgcttaatatattaaacaaaattataattattttgattaatataaattacataggagcaaaacatgaatccagatttacttgcggcacttattcttgaaggtcagaataatattaaaaatattgctattattcctcgtgattatcattttgaaaatagtttaaattatgtgttagtaggtttgcggcgggctggcaaatcaacgctattatttaaaagggcgcaggatttagtgaataaacaaaatgtggattggtcacaaattgtttacttaaattttgaagatgaacgattagatggttttcagttggctgattgtaataatatcttaattgcagccaatcaattaacaactaagaagcattattttttatttgatgaaattcaaaatattgctggctgggaaaaatttgctcgtcgtttagcagatcaaggtgaaagtgtttatttaaccggtagtaactctaaggtgttgggtcatgatattgttctgcggctgggtggaagatatatgaccaaatatgtggcaccttttagttttacagaatatttaactgctaaaaaaattccacatgataaattatccgtcttggatacagttaataatggccaaattcgtgctgccgcaaatgaatatctatgttatggtgggttgccagaatctattatcttaacagacaagagaaattacttaacaagtatttatcaaaatgtatttttagctgatatcattgtccgcaataagattcgtaatgaaaagacgatttcattattacttagaaaaattgccgatacagtaatgcaccaagtttcagaaactgtcaaatcttttgtgtaaatagttctttctcgtaaattgattttttaattatttatttaatcaaagtaggattctaaggtgtcctgaacctgaccaaagcctttatgaattcgattgaaataacggtcattgtagctcattgcctgaatgccaataaaagcatcaagcgactgttcagttggaaactctgccttaggcttagctttgcgcttgatcacattgttaaatgattcaatcatgttagtcgaataaattgaagctctgatctgcttgggatagttataaaagaccagcagatctggttctatgtctttcaagcttctgataacatggctgtaaaccttgccccatttggtatagaagtcatgcaggacagctgtggcttcttctttgtttgtctgttgatgcacctgtttgaattcgttcatgatcttttcacgatcgtcgacgcgtactttagcgcagatattgcgcatgacatgaaccaaacagcgttgaaaatgagctttaggataagtcctggccaaggctgttttcatgccaacaacaccatcagaaagaaaaagctcaacttgctttaagcctcgggatttcatgttttgaagcatatctgtccagacttcaatgttctcgctaggcgcaatgcagtagtcaatgacctccttgtgcccattaggcttgatgccaatggcaatatagactgcttcacgctcaaatgtttctcggcgcaaaggaaggtatgtcgcatccaaatagacgcagaaaaacttgtcgcttagcttgcgtttgtggtaagcctcaacctttggaatcatctgcttggaaatatttgatacctgagctggactgtaatggctgccatacatcttttcaattagatcggctatttccctggtggtcacgcccttggagtaaagcttgataatcatgctttccaagatatccgagtgctgcttgtagtcaggcagcgtgtgctgatgaaattgaccgttgcgatcccgaggcacttgcacttcaattgggccaaattgcgtatcaactttgcggaaataagcaccatttctagagttgccagtattccagccatttctggcatagggatcatagcccagaaaggcagtcaattcagcttctagcaagttattaacagcctgttgtagttctttgcgcaataaatcatttattttgtctggattgaatagagcttgagcaaaatctttggtaaaatcattcatgaaggagttcttctttctgtatgtgtttttttgttcaaaccaatcatacgagaaaggaactcctttttctaatgtttaaagaaataaatttaaggaatcattcatccttacacaaactattttacagtctcaagtttcatatgcaactttgtataaaaatataaaaaatgtgattagtacggtaagtcgcaattcgattattgattatatcgattacgctaaggatgcatatttgttattttccaccaaaaattattttgctaaatttagtgagcgtgaaagcagcccaaagtattattttacagataatggcattttaaatttgttttatctggataaattgccagcattactagaaaatctagttgcgatcaagttgcataataaatatcaagagaatttattttatttaaaatctcaaaagacagggatagatattgatttttatgtaccagctagtaaaattgcaattcaagttgcatgggaagtaaatgatacgtcaaaagaacgtgaagttgggaacctaattaaattagctgataattttgatgaagttgaaaacttaataatcgttactcatggtgaagaggctgaaattcagcaagaagataagataattcagttaatgccactatataaatttttattaatgagatagtttttcgataactcataaaatggtaatgctcaaaattttttgagcattttttataactataagatctaaagagatataaaaatggacataagatctaaagagatataaaattaaagccaacaactaaaataatgaaaataggtgaacatcaattatgtctgaaataacgaatccatttgaccctaactttggcaaagttcccaaaatatatttggggcgacaaaaaatagtagaagatatagtaagatcacttgaaagtggcaccggaccctatcaaacttcaatgatctatgggatgcgcggggttggtaaaacttcattacttgctgatattacctcaactttagaacaaaaagataactggattgttatttacttagccatgacaaatgatttgcttgccacgctcatccaaagtatttatcaagaagcagcgaatccagtaaaaaaggcgttgaacaaaattgatggtgtaaagttttcggcttttggctttgaattggaagttcatatatcaaatcctcaatctacttatcaagtgttacttgaagaaatgttaaaagttttaaaaaagcatcaccaatctttattgatagcaatagatgaggttaaagaaactcctgagattgttaatttggcgtctatctatcaaattatggtgttaaaaaagtattcaattaatatgatgatgactgggctgcctaagaatgtttctgaactccaaaataatgatgtattaacatttcttttaagaagcggtcgtgtaccattaggaccacttgatcttttcgatattaagtatcggtatcaaaaagcatttgaaagaggtaataaagagattaataatactgccttaatgaaaatgactaagctgactagaggttacgcttatgcatttcaagacttgggatatcatgtttggcaacattctactgatcaggtaacagatgaaagtattgaaaattcgatctcatcgtttaaaaatgatctgtttcgtaatgcttatatcaagattatctctgaattatcgccagtcgatcgaaaatttttattcatcatggctcataatgataaaaatgttgttaatataagtgatattcgcaagcaaatgggaaaaagttctaattatatttcgcaatatcggcagcgattaatggatagtcaggtaatcattgatgcaggatatggcaaagtggcattttctctgccattcatgaaagactttttgttagaagcagaagaattatatgaaattgataattaacgaaaaaagctgctaattaaactcttcgctttcgtccaccaaacgtgtaagcaataagccgaagtgaatgacaagatccaggttaacagcaagattccaaagaaagttaagaatgggtggtaaatggcgtgatattgcatgttaagaccgcgccaaactaattgattccagaagacattggataaatatgcgcgataagcataagtagccaagaaatggaatacttttaaactggtttgcgaattttttctaacttgatgcaggcaaaaagctgaaatcagtgcaattactgctaaacaataaagagtcattgacggcttgtaatatggtgcattattgaagttgattggataaccgaacttgtgcaactcaacattagtccaaatgaagcaagcaataaataatatggtaattacccaccaaaacttagtgaccagctggttgtaataaccacgcaatcgccatgctaagacaccatacacaccatagatgaagaatgaaataaaaatgcggtcgagtaaataccagtcatgttcgtgcatgccatggaagacattgtaatcatagaaccaaagccagacaaaatagagtacgaaagtgattactgcaatccaaatacctcgagttagattgtgtcctacatagcggcttaatccccagaaaagcggcattaaaatgatgaattgcaacatcatcgtgttataccacaagtgcggggcggcgttcccattaatgaattgccagcagaatgaaccaagattgttaaaatggttaacttgttgcagccatggcatccctactaggtagattaacgtccaccaaatagtaggtacaaaaagattagaccaatttgtctgcatatgttttgcataagaaaaactatttttttcattattagtacggattgtggtatacaaaataccaaaaataaaagctggagccgtatatttgactaaattataaaaaacgccaaaaacatcttgtgtgtgaaccggttgttctacgtccatgaccagcgacataattggctgtgagattactgcgctgcaggcgaatacttttaaataatcgccaatatcagctatttgatagcttttaaattgatctgttttcatgaacttgctctcttcttttcctaatattattgtgtcatttttttaaattaggcgaaaggataatcatgttaaaattagtttagctattttggaaatggggtcaaaatgtcagtagaaaagatcacacaaaacgcactaaaagcattgctttatgaagtagttaccaatcctaagccaggtttagtggatccagttgacgtggggtctcatcctgatatgaatgtgtatttgtttattaatagcagtttgagtttagaaaattattttcggcaagcagctaaaattggagcagattttacggggcaggatttgcggcaaatgtttgaacaattgcgtcaagctggcattgaggcagaaaaagcaatgtttaagacaacgcataatataaatacccataaaggcgcgattttttcgttagggttgtttggctgtgcaagtagctattgtgaaaataataatcaaggtgaatttgaagtgatccagcagatgactaagggcttagtaaagcacgatttaggcaagaggaatgagactgctggagaaaaacaatttttgcaatatggtaaaggtggagttagagcagaagcagaagctggttatcctttggtgagggatgtagcactgccatttttagctcaaaccgaaggtgatttgaatgttcgtttactcgatacgttgatgaaaatagttagtgcgattgaagactcgaatttaataaaaagagcgggaaatattgaggttgtttcttgggcacataatcaagcaaaaaaatatttggcattaggtggctacggtactcaagctggtaaacagtttatgttagaactaaatcagatttttaaagagaaaaattatagccttggtggcagtgcagatttattgattattacaatttttatggcgttgcagcgtgggattatttaacgcaaaaattgtctagttaagaactagacagtttttttgctgtgtgtcgggcatggcatttgtttagtctagtgaaagtctagatcacgggtagttgtcgccaagtgtagcgaaccacaagccgttagcggtgacgctatgggtgaaggaagtggctagcgagttttccgagcctacgtacagaaacctggtcaggccaaatggtggatgagactgcagcacaagttaaagtccaaaggacaaccgtaaaaccaagacggtaaaccagggggcagtggaaaattaaagatgaatgtcttaccccgagagatctcgtggacaggtgaaaccgagtaagctttaatatcagcgatcgtaagcctggtcgaaaaaggttaatcgcgagaagtcagctgaggtcgtagtagtgctgaaggttttgtaatgaaactggagcgaagggcctaatgtttgtaagagcatatctcgctataagcaatgttcagacagtccggataagaggatagcctagcacaaagagaacgtaactctttgatggtgaaagcaattgggacaattctgaataaatttacaagtagaaatggagatatcacgagatggaactaattgaacagattttaagtcaaaacaatctcaaggaagcaatcaggagagtcaaaatcaataagggagcgcctggtgtagacaggagaacagttgatgagcttgatagctattttaaaaagcatcaagtagaaataaaggacgccatcatgaagatgaagtatcgtccgcaagctgttcgcagagtctacattcctaaagctaatggtaagaaacgtcctttaggaatacccacggttgttgaccgagtaatccagcaggctattgcccaagtattaatgaagatctatgatcctcattttagtgagcatagctatggctttagacctggacgcagtgctcatgacgctattgaacaagtcttggaatatttaaacgaaggctatcaatgggttgttgacctggatattgagaaatactttgacacggtaaatcatgataaattaatttcaataattagagagcaagtaaatgacaaaaccaccctccatttaattcgagcctttcttaaagctggagtaatggaagatggttgggttaagcctaataaactaggtgtaccacaaggcggccctctttcaccaattctatccaatatctatttagataaaatggataaagaattggaacaaagaggcctgcgctttgtccgctatgccgatgactgcaatatctttgtcaaaagcggtaaatcagccaaacgtgtgatgaattcaatttcatcatggctagaaagaaagctattcctaaaggtcaacgcaaccaaaaccaaagttgtacgaccaaccaagagcaactttcttggctttaccttctggaaaagtggcgaatactggcaagcaaagccaggagatgaccgcaaaatcaagctttatgacaagatgagagaacttctctgtcgcagaaaagcagctgctcagcctctatcactagtctttactaagataaatcaagtagttagaggctgggtcaattactttagagttggcgacatgaaatattttctaattaagttcagtcaatggctgcgtcataaagtacgggtggtaatcattaaacaatggaaactaccaaaacgaatatacattaacttaatgcggattaacaaggcactaaagtgcaattttagtgatgaagatattcataaagtagctaatacgcgcttaggttggtataaaagaagtacgggtcatgtcattaactttctgcttagcccaaaagtattgggcataagcaaagcggatcgcccaggcttggtcgatccgctagaatattatttatctcgtaaataatcacaaacgtagcgccggatacggaaccgtacgtccggtgcaatgagaggggcgagttataaaactccctctactctattttagatttaaagagatttaaaatgaaaaatccttttaatccgacttttggagatataccacaaatttttttaaaagataattcggataatgaaactaaaaatgtagattcaattttctatttaggtttagataccgagtattgaaaaagcattaagctattgcagatagcttaatgctttttttactatttgattagatctcttataatccaaatgcaattttgtataataatgcaccacagattccacctgcaattggtgcaaccactggtacccaactgtaatcccagtgggctgaacctttgtgtggcaaaggacataaagcataaacaattcttggacctagatctctagctggattcaaagctggtccagttggcccaccaactgccataactaaagcagtaattaagaaaccaaccccgatgttagcaatgtcttcagattgcttgaagaacatgccacgatataaaccaactgcgatgaaaagcaaaatagcagtgccaaagaattcggtaataaaaccgttgaacttactgttagccgaatcaccagtcgcaaaactggcaaaaacagcatcatcactagtggttctgccaatgtaaggccagtagacggctactaagattagttgtcccacgatggcaccaagcatttgtaccaagatgtaaggcattacttgatcccatgggaagacgcctgaacaagcctgagctaaggtaacagcagggtttaagtggttccctgaaattgaacccaagagcatggctgggagcattactccaaacccaaaaccgaaggcgatcaagagccacccaccattggcttgaccgtcacggctattaccaccggtatcacgtagtacagaattggcaactgatccgttacctaaaacaactaaaataatcgtaccgaaaaattcggcaaaatacttcattaaccaagtatgttccataatagatactttcttctcctttagtagaaaaaataagtgaaaaatagtacaaccaaaaattatactcttaactcgaaaaatagatatagttttttgtaaaaaagcaagaaaatagcattaaaaaacactaacttttaaattaattaaaaagatttactatttggctgcaatcatcacaattttataattatccagcaactcaataaattagaccgttccaaatatgaacattatttaacaagccctagataatgccaaatctacttttgacaaataaatgcataatcattatattaatttcacaaatttggtatatagctttatatatacttaatatataactttaagcgctttcaaaatattgtggtactatacagttgttcacaattaatatgcataaaaggaaagagagtagcagttaatgagaacaatatatttggtgcgacatgggcaaactttgttcaatgtgcatcataaaatacaaggtacttgtgattctcctctgacggaattagggaaagcgcaggcgacagcggtgcggaagtattttttgcaaaaagaaattagttttgatgccgcattttgctcaaagcaggaaagggcaagcgatactttagaaattataactgataatcaattgtcttatacgcgactgcgtgacctgcatgaaaaatctcatggtgaatatgaaggacaagatgaattcatgttgccatggcgacgtggctttagccgtattaatgccgcaatggagccggatcaacatgttgaagaaagaatggaacgagcgatcactaaaatcattgattcaacccatgccaacgatacaattttgattgttggacatgggacggctttaaggttatttacgcagcgagtaaatccaacttttaaagaatatgataattgcgggatagtaaaaatgtctgctgttgataataacttgaaatatttaagttatgtagcacccgctaaagatgggttttgagactgtaaaatagtttgtgtaaggatgaatgattccttaaatttatttctttaaacattagaaaaaggagttcctttctcgtatgattggtttgaacaaaaaaaacacatacagaaagaagaactccttcatgaatgattttaccaaagattttgctcaagctctattcaatccagacaaaataaatgatttattgcgcaaagaactacaacaggctgttaataacttgctagaagctgaattgactgcctttctgggctatgatccctatgccagaaatggctggaatactggcaactctagaaatggtgcttatttccgcaaagttgatacgcaatttggcccaattgaagtgcaagtgcctcgggatcgcaacggtcaatttcatcagcacacgctgcctgactacaagcagcactcggatatcttggaaagcatgattatcaagctttactccaatggcgtgaccaccagggaaatagccgatctaattgaaaagatgtatggcagccattacagtccagctcaggtatcaaatatttccaagcagatgattccaaaggttgaggcttaccacaaacgcaagctaagcgacaagtttttctgcgtctatttggatgcgacataccttcctttgcgccgagaaacgtttgagcgtgaagcagtctatattgccattggcattaaacctaatggacataaggaagtcattgactactgcattgctcctagtgagaacattgaagtctggacagagatgcttcaaaacatgaagtccagaggcttgaagcaagttgaactctttctttctgatggtgttgttggcatgaaaacagccttggccaggacttatcctaaagctcattttcaacgctgtttggttcatgtcatgcgcaatatctgcgctaaagtacgcgtcgacgatcgtgaaaagatcatgaacgaattcaaacaggtgcatcaacagacaaacaaagaagaagccacagctgtcctgcatgacttctataccaaatggggcaaggtttacagccatgttatcagaagcttgaaagacatagaaccagatctgctggtcttttataactatcccaagcagatcagagcttcaatttattcgactaacatgattgaatcatttaacaatgtgatcaagcgcaaagctaagcctaaggcagagtttccaactgaacagtcgcttgatgcttttattggtattcaggcaatgagctacaatgaccgttatttcaatcgaattcataaaggctttggtcaggttcaggacaccttagaatcctactttgattaaataaataattaaaaaatcaatttacgagaaagaactatttacacaaaagatttgacagtttcgtggttttaaataaagcagctaaaaatgaaatgttagttgtgcgttaacgaaaagagaacaagcatgaatagagataattatattttgtggtttgatcaattgcatcgcgatgatgttgatttagtcggtggtaagtcatcctcattaggtgagttgacttctgaaacgaatgtcccggttccgtatggttttgcgactactgccatagcttatcgccactttatgaattattctgatttaaatcaaaaaattgataaattattggccactttaactgatccagaagattctgagcaattgcatcgaatttgcaccaaaattagaaaattaattatagaagcgccgatgccaaatgatttagccttagaaattagctgtgcttacgatagcttagcccaaaagatgcaccaaaatgagccattcgttgctgtacgttctagtgcaactgccgaagacctgcctgatgctagttttgctggcgaacaagatacttatttaaatattcatggtcgtgagaatgttttgaaaaaggtgcaagaatgttacgcttctcttttcaccgaccgggcaacttattaccgaattaaacaaaactttccacaagaaaaagttgctttatcagctgcgattcaaatgatggccttttctaaagcagctggtgtgatgtttacggtcaatgtagcaactggtgatgacactaaggttatgattgaggcctcttggggactaggcgaatacgtggtgtctggaactgttacacccgataactatgtagttgataaaaatacgatgaagattgtacacaaaatggtgactaaaaagccaattgagttgatcagattgccatcgggaggaacaattgaacaaaaggtagcaccagatcaagtgaataagcctgctttgactgatgcgcaaatcattgaattagctggttatgctaaagaaattgaaaaacattatggctgctacatggatatggagtggtcacttgatcaaaatgataagttgtggttagttcaagcacgcccagaaactgtttggtcacaaaagaaaaagcaggagaaaaccgatgcaccacaagaagcaactacagaacaccgagtattgttaaaaggcttgccagcttcacctggttttgtctcaggcaaggtacatattattgatgatccaaaagatatcaatgaatttaagcagggcgaggttttggtcactctaatgacgtcgcctgattgggtgccagcaatgaaaaaggcggccgcaattattaccaataatggtggaatgacctgtcatgctgcaattgtatcacgtgaaatgcagataccttgtttagttggaacaactagccgtggacaagctgctacgaaaactttgaaaaacggcgagactgtcaccgtcgatgctaaaaatggtgtggtttatgctggagttgttaaagacgcggttaaaaaagtcgatgaaaagccagctgagcctgctgcagttgaatatttcccaccaactgcaaccagagtcatgatgaacttaggagatcctgatcttgctgaaaaatatgcatctttgccagctgatgggattggtttaatgcgcgaagaatttttatggacgacttatattcaccagcatcccctttatttgattgaaactggtcatccagagagggtagttaacgagctagctaatggaatcggtaaagtcgcgcgggcaatggcaccacggccagtagttttacgtttttcagactttaagtctggcgaatatcgcaacttaaagggcggcgacaaatatgagccgcatgaaccagcagacctattaggctggcgcggtgcttctagatattatgatccaaaatatattaatgcttttaaattggaacttgaagcggtaaaaaaggtgcgcgatgagttcggattaaagaatttacatgtgatgattccattttgccgaacagtggatgaagcgcgcaaagtgacggaaatcatgcggacacaaggtttagttagaagcgcagacttcaaggtttacatgatggctgaaattccagctaatattattttggcggaccagttcaatcaatttattgatggttattcaattggttcaaatgacctaacgatgcttttactggggtgcgatcggaataatgatgtgattgctgatctttttgatgaaagaaatcttgccgtcaaaagggcgattaggcacttgataaaggttgctcatcaagatggtaagacggtttcgatttgtggtcaagcaccatcagaatatccagaatttactgaatttctagtcagaagtggcattgattttgtatcagttaaccctgacatggtgaaggcgactaagctaaatgtagctcattatgagcagaggatcctccttgatcatacaactggcttaggtaaaaaggatccaaatgaatataattggtaaaatacgcgtggtgctagttaaatcgttttagttaataaaaaagtccaatcttgttagactcgacttgtaaatagtaataatagaaaagagtctgatctgattgaactgccttaagcttaagcgttttagccaccatttacaagttagttttaaagatttagtgataatttgtcggcactggtatcgtttgtatgcaccggctgagtttactcatcggcgaaatattgatcaaattaaaactacggacagtctgattttggctttacttatctggcaagctaagacaggaattgaatcacaaagaagattctgtgaatgtttcaattgtttatcacactcacgttttaatcggcgttcacgtcagctattgcaattgatttatcagatacggcaagaaatgaataaaaaggttgacctgaatggacatttcttgatcattgacagctttccggtacctgtttgccaaccaattcgcaactatcgtgctaaaatttttcgcggttatgccaacattggttataaggccaccaagaaaatttacttctatggtttcaaagttcatgccattgttagcgatgacggttacattcttgattatgtcgtaacaaaggcatcagttcatgatgccagggagacagttgaactgatagaaaatacccatccatctaattactatcttcttggcgacgaaggctatttaggcaaagaactgcatcaacagctaaaacaaatgggttacgaactttggacaccatatcgtaaaaatatgacaggagctaaaaagcacaatgatcatcaattgatggctattcgcagaacaattgaaagcgacttttcgcttctgacctattacaatgccgagaacaatcgagcacgtagtctgataggctttcaaagccggttggaaattgcaattttagcttataatttggcttattgtctagaacgatttaactagcaccacgcgtggtaaaatttataatttgatgaaaagtctttgattgcagtattgcagtcaaaggcttttttagagttcaattttgtttttgggcaattttacatttaatttagtaaaagagtaaggttgaactaatgaaatttcgtaagcatctaaggctaatctctcactggcaaaatcagggttatataaaggatcgcctacaataggacttcctaaagaggcaaggtgaacgcgaatctggtgtgtacgaccagtttcaagcgtcaatttgacaatcgcagtattgtcatcatttttttgtaaaacttgataatgagtaactgctcttaatccagtaggatcgattttgcgtttgcgttgatcaagtggatcgtgaccaattggggcattaatcgtacctctttcagctaagtgatcagcattgataactttagctaaataatcgcgatgaaaaattttgctggttaattcacgatttaaaataggtacaactgcaggatttttagcaattaaaagtaaaccaccagttaacatatctaatcgatgaacaatatagggactctgaccaagataagtagtacaatcgttcagagcagtattagtttcatttagattagggtgcgttttttgcccttttttcttattaataattaaaagattatcatcttcatagataacatcgggcatcttaccgcttggtgcataagcctgttgatcactttcaacatgatccaagttaatttcaattttatcaccaggtaaaatgttttgattaaaatagcgatagttgccgttaactaaaatattttgttcaattcgcaaaaaatgacgccacttgcgagggattaaaagttgacgtagtacttcattgacagatgccggagcaagattttctgggtaaaaaagtgtaaaacggaaactcataataatttcttaagtctaatctagttataaacacgtgttttgatagtatggtacaattttcttgtttctaaaaaggagcaatatttaatgaataacgaccaaccaagaagaggtggctttaaagatgcttggcatcgatttgatagtcgcttctttatcggacgctggattattttaatcctgctcacattgatgctcttaacttgtacctattatacaattaaagttaagacatcaaacatagctaatttgaaggcttcgctttcaaccacaactacaatctatgactacaagggtaaaaaagcaggttctttatactcgcaaaagggatcatttgtggaatatgaccagatttcgcctaatattcaaaatgccgtaatttcgactgaagatcggactttttggaagaacccaggttttagtattaaaggcatggcgcgagctactttaagtttagtgattcatcacggtcaagtaactggtggtggttcgaccttaactcagcagttagccaagaactcgcttttgacccagcagcagactttttcaagaaaattggaagaactcttttttgcaattgaaattaaccatgtttactccaaaaaagatattttaacgatgtacttgaataatgcttactttggtaacggagtttggggcgtgcaagatgcaagtcgtcgctattttggcaaaaacgcaagtgaacttaatccgagtgaagccgcaactttagctggaattttacgaaatcctagtttttataatccggttgatcacatgtcaaatgctttagcaagacgaaatttaatcttaaacttgatggtggataataataagttgacagcggctcaagctaaaatgtatcaaaagcaaggattaactttgcggaatacttttcaaaataaaaacggctatcgctatccttacttctttgatgctgtagttgacgaggcaatctctaaatatggcttaactgaagaacaagtcatgaataaggggcttaaaatttatactactttaaatcaaaattatcagggtaaattgcaggatacttttgagcaaagctggcttttcccacaaaatggtagtgatggaactgaaagccaaggcgctagcgtggcaatggacccaagtactggtgctgttcgggcaatcatcggtggtcgcggtaagcacgtcttccggggttacaatcgtgcaacgcagatgaagcggcagccagggtcatcaatcaagccgttggcagtatatgccccagctttacaaaatggctatcactatgactcgcaactatcgaacaagttgcagaaatttggtaaaaatggctatgaaccgcataatgtggacaatggctattctaatacaattccaatgtatgaagctttagaacaaagtaaaaatgtgccagctgtttggctattggataagattggtgtaagtaaaggcgtgcaatctgttgaaaactttggaattaaggtaccaaagagtgaccgtaatttagcgcttgccttaggtggattatcttcaggcgtttcgccaattcagatggcacgtgcatattcagcttttgccaacaaaggtaatttgcctaataattctttctttattaccaaaattactgatgcttcgggtaacgttttagccgaaaataataatccaagcagccaccgcgttatttctgaaaatactgctaaagaaatgacgactatgatgctcggcgttttcactaatggtacaggacgctctgctcagccaaatggcttccgtgtagctgggaagactgggtcaactgaagtacctaactcatatggatttggtaccaaggaccagtggatcgtcggttatacgcctgacattgtacttgctacctgggttggttttgaccacactaacaagcaacactacatgcagggcatttctgaaacaggaattacgcgtttatataaggctgagatggaaggaattttgccgtacaccgcgcaaactgaattcacggagaaggcacctaaccagattgtgaagaataatggttctaatgatgactggactaatggattaggtgaaaaaattcaagatggactcggttctgcaggacagaaaatcaatgaatggtataatagccttaaaggcttatttggccaataaaatttaggaggactagatggttaacatttacgatgctgctaacaagttagcagaagatttgactcaaactgatcaatacaagaagttgcaagaagcaattaaagctgttgaagatgataaggatgcttcagctttattcaaaaagatggatgaattgcaaaataagatcatgcaagcacaacaagctggtcaaccactttcagctgaagatcaacaagcttacaaggacttaaatgatcaagttcaaaagaatgataaaattgtttcacttcttacgaatgaacaggggttgtacgatttgcttggtgaagtacaaaaagcttacactaagccaattaatgatctttatgaagatcttagaaattaatattcgcgatgaaatttattcactttgcggatgcgcacttagatagtccatttcgtgggctatcttttttgcaatctgaggaatttaaccatatctatcaagcagctgatcaatcattaactaaaattgttgatctggccttgcaagaaaatgtcgatttagttttaattgctggtgatacttttgatagtaatacgccatcaccacgagctcagctattttttgccaagcaaattaagcgattaactgaccaaaaaattcaggtagtgatgatttttggtaatcatgaccacatgaagcaagaagatctgctagttagtcccagtccttactttaaattgttaggcaataatgaaacagtagagcaagctacttttactacggatgcgggttttaactatgacgtaatcggcttttcatatctgaataaccatatcactgaggataaaatcccagaattcccagcaaaaggaaaaaattatacttttggtttaatgcatgctcaagagaaatcagctactgctagtcagaatgtgtatgcaccgtttacagttgatgagttgcaaaacttgaattatgactattttgctttgggtcatattcatgcgagaaataatttaagtagtacgccgtggattgtttatccaggtaacattcaaggtcgccacattaatgagatgggagccaagggatgctatctaggtgagattgatgaaaatagtggtaagactactattgattttaaagaaacagggccaattttatggcaagggacaaaaattaatcttgaaggagctatcagtaaagctgacttacaagcgaaaattattgccaagcttgaatctggacaaaaaacgtactttagtttgacgattgctggtgctcaatatttgagtgccgaagaacgcgatttagttcaggatcttgatttttggcaaactatttctcaatcgctgccatttgcttctcagttagttgatgtgcgctttgttgtgaatactagtttaaagttaaatgacaatgaccaacaagccttccaagctgccaaagaagagttatttgcaccagctgaattcaagcaaattgttagtgactggcaaaaaaaggatccagaagctgctaaattagcggctgatccagactttattgcggcggttaagaatctaacagaagtaaaactaatgagtaaattgaaaggaattaaggatgagactgaaacaaattaagattattaactttgggcagttctcgaataaaaccttcgatttgcctagtgatcaaattaatgttttctttggtgccaatgaagctggtaaaagtacaacggtagcttttattaaacagatcttatttggctttcatttgagaagtaactcttcaccgttttttgaagattatacgccgctagctcatgttagtccgatgggcggtaatttagtttttactgcagctgatggtgaatacgaacttgagcgactctatgctaaaggtgacaagactaaaaagggaattttaaccgtcaaaaaagatggtcaagttgtacctgagagtgtattttttgatcaaattcaaaatattgatggctctttttacgctgatagttttatttttaaccaagaaatgctgggtcaggttaacagtttaagtcaagaggatttgcttgagcgaatttattacttgggagcagcagattctagcaagttgctggaaatgcgcgacgattttgccaaagaaacgggtaagctttttaaaaagacaggtaaaaagcccgaagtaaaccgtctgcttaaggaaatgactgatcaacgtgataaattagcgcagactaaaaatgagtttaatgattatgaacagctgcaccaagattttgtacaaaaaagagcggcattaaacagacaaaaacaagatctggctgttttacaaaaacaagaacaagatttgcatgatttgcaaaaagaaatgggcaattatcagacgctgcttgatttgcaaaaacaggtcaaggatgtcgactttaatggtcaaaattatcaaaaagcccaagatattatggctcagggacgtaatttgcaaaagacgattcaatcggtagaagcgcagttgcagggcctgggtgaaaacgatcagtctgattttacgctagagaagaagctaatccagcagaagcctcaactcttgcagtggcaagcggaatatcgtaattgtttgcaaaaggctgaccaattgaagcaggagaaagagcaactattagctttgacacctgagttaaaaaatctactcaagttgacaccagagcaaattgaacaaatgcaggcagactatcaagctttgccaggtgctgtcaatgagcctgcttatgtaactactaatgacaagctttggtatgttatcggtgcagtgttagcggcattaggtgtagttcttttggtagcgttgggtacagttggtgtaattgcattaattactggactaattttcctagcagcaggatacttaaaaaatagtaaccaaaataagcaaaatgcggcagtattagaaaagcaaaagctggttgctcaaaaacgccaagctttccaaacaaaatatggattgaatcctgatacgctaaacttaaatagcttactaactaatctgaaccaatatcaaatcaaaaagaatgccgcacagactaataataagcaagtaactgttttgaatcagaatgtggctcaactggcctcaagtgtccaaaatgcattgaagcaaccgattgataatgactttagtcaagttttgaacggtttggacgaacttgagacacaaattagtgaaaaacaagaattgcttcaaagaaaatccagcttaactgcatcactaaagcaggacaagcaagatttgaaagaattgggtctgaaattacaggcactttttgcccaagctaatgtggaaaatatggcaggttacgatcagctttatcaagattcacttaatcaggctaaactgaagacgcagattgcggccttgaaggaatcgttaggcgatgatcttcaacagctgcaaatgcagacaaattcaaccgaattagcagataaattaacggctttgactgaacaaattagtactaagaatgcagaaattaatgaacttcagagtcaagttgctcagttgcaagtgcagttagacaatttagctgattctactgcggtgtttaaggctaagcaggatctggctaatacagaaaccaattttgtccagagcagtaaagaatacttggctaacttgtttgcggcaaggtggatcagtcgctcgcttgacttggcatctaatgaacggttccccaagatgcttaaggcggctcaggaatacttagctttgctaacgggcggcagatatgttgggattaatttagataagaagctaacagtagtcagaagtgatggtaaaaagcgcgaagtaaaatacttgtcacgggggactgctgagcaattatactttgccttgaagttagcttttattgagcagatcaaggatgaaattaatttgccaatcttgattgatgattcgtttgtaaactttgatgatcagcgagtcagctatatcgatcagttattgcaaaagattagcgaaaacaatcaagttttaattttcacagctcaaaagaatttagttgatcagcttgggattgagccattaacttttacgaaaggaacacaggatgcttaagagattgttagattacaacgatggagaagaaatggacattgttgttttgattagaaactcacagttgcgtcataataaaaagaataagttgtttttagcgatgcaattcagtgatggctcaggcgagattcgcggtaattactgggatgctaacaatcaagatgcagcaactttttcaactgggacaatcgttgagttgaatggcaaaagagaagaatatcagggtcgccctcagattaggatctattctctgcgcgtggtcggtccacaagaaggctatgaattagatcaatttattaaatcagcgccggaaccagttaatgagatggaagctgaaattaataaatttgtgatgcagattgataatccgacctggacaaaaattgtgaagtatttacttcaaaaatggcatgatcgtttttatgatcatcctgctggtaaaagcaaccaccatgcggtccgcggaggtttagcttttcatactttatcgatgcttaaggatgccaaaggtttggctgataattatgagcaagtgaatagatcgctactttatgcgggatgtattttgcatgatatgggaaaagtactggaactttcaggttctgccgcaactcaatacacgactgaaggaaatttggttgggcatctggttttaattgatgaacaaattatgctggccgctcaggatatgaagatgaatctggagtcggaagatttactcttattgcggcatatggtgcttagtcaccatggccgctttgaatatggttcacccaaattgccggcattgctagaagcggaattattgcaccgaattgatgatttagatgctgcaatttatgcagtaacgaatgccctgcagcatacgcctaaaggcgagttcaccgagccactactgagtcaagatggcaagcgatattatcgaccgatgcacgattcagcgctagataacgcaaaacatttagaataagaaataagcatcactgcagttgatttgcagggatgcttattttgttgaaaaattgaactagagttttattataatttcatagtataataaatctaatttataggggagtaaaaaggatggatattgctgaaattactaaaatgattgaggcggttaaacaaataatagaaaagaatgattacattgatttgccgctatttcagaattctagtcaattaaggttaaaaggaaataattataattttatacttgatttgaatagaaaaggacatagacgtcctaaatgtacttttctattaagggaaaagagaaataaggaacagccattagttagagtagatattattggacgtcctcatcaaaatcctgttggagactttaaatggtcaaataaagtcattccttgtcctcatttgcatagagcggattttccaaaatatggtacatatgtagctgtaccacttttggaaaagaatgaaaattttcaattgagtcagaatgatttaaataacttgtgtgaatgcttgaagaagacattaaagtttttgaatgttgataatataaattcatataattttcgagaacaggaaagtttattttaaagaaaggggggagaacagttaaatatgtttgatgtagagaaaatgaagaaaatatattttgactggatagataaaaagattcaatttgtcccttctaaaaatcaggattatatgactatcactacaccttttttagatatgtacaatgattatatagaattagtgattgcacaaggaaatacatcaaaatatataattagtgatgatgggtatactattaatgagttagggttattagatattaatttaaacagaaaatctaaacgtagggactactttcaatcgattttgattaattttggtgtgaaaaatcagaataatgaattagtaattgaatttgatgacttagcccaatttccagatgcacaaaataggttaactcaatgtatgttgcaagcttttgatttattacagacttctaaaaatagtgttattaagtattttaaagaagatgtaacaaattattttattgataataatattccagtaggagaagatttgagtttactaggaaaaagcggacggaattctaagtttgatattgtggttggacgtacaagaaaaaaaccgcaacaagctattaaggtggtgaatacgcctattaattctaatatagctaaccctttatttagaattattgatgtacgagaaagccaacctaaaacagaattttcagttattgcgaacaatattaatagtcctgtttctagtgattttaagtctgcctttaagaactataatattcctgtttattcttggtcagaaagagagcaatggctttccaaatttaaattggcaatgtgatagttgattaaaggtgttgagctgaaattgtaaataatattagttctagcattaggcaatatggaacatttagaataagaaataagcatcactgcggttgatttgcagggatgcttattttgttttggtgaaaaattgtgtcaataattttttgaacaaagttattgacaaattagctgaagaataataacatgtttatacaattgaaaagcagagatgtttttggatagattagagacttgtctcctttctatttttttattgataaaaagttcaagaggtatacattgatttcctcttggacttttttgatgcattgaattgctaaagatgttataaaaattagggtagggaataaaaatgaaagcatcaaaaaaattaattttagtatcggcagctacgataatgttgactgtacctgttttagcaaataatcatttgtctaatccagttgttgccgcaagtcaagataatacacaaactactaaattaacgttctatattaaccacaatgcctatgtttacaatcatcaaggtaagcgtaccaagagcaagattaagaagggaaagttactaaaggtgactatattgaagcctaaggcaattactaacccaaatcaaagcaggtatttcttcaataatgtattagctggcaagtatttttcgttaccgacagtaagcatcaagaagacagactttgttaatattggcaaaaataaatatattaagccaggcaacattggtagaatctcgccaggaaaatatcaatatgcggatctgtcaactaaggaaattaaggtaattaccaaaaagactgctccagtaactaatcaaatagggatgccaattgctgctccaattaagaagggaactaagcttacagttgatcagaactattatcataatgttgacggcgctgatgattatttgagtagtctggaatattatcggattaaaggtactgataagtgggtcaacctacctgctatcaaaaagtcaactcggattatgccaaataattttgcattagctgcatctactgaagataattatgtcattgccggtaactcaacgtatctctataatattgacggtgaaatcgttgataagagttatttattgattccagatgttaatgttggcgttgatcgagctctttatatttggaacaagcaaactaaacaagctgatctatattatcatcttacggctaacaaaaaattggtctgggttccagctcttgatggaacaggcaagactggtactacgattaccagcaacggctcatatgctcaccaaactaaagatacagcaaatacttttgttaaagctagtgatgtgacaagtcaaaatccagttgcattaaaagttgataatacaccgagcgaagcacaagcagatgcaagtcaggccactgctagtgactatggtgagttgcaagccttagttgatcgagcaggtcaaattaaaaaatcgactttatatcgtttgactgaaaaagcacagcaagaaagatatgatttggccgttgataacgcacaaaagttattgactaacaagaatacttctattgcggcagttaagcaggctagttggcaaattaaatacgatcaaagtaaattagacggacaaaaagtttgggttaaaaacatgaataaactaactaaggcagaaaagtcttgggtagtttcattggctaattgtgatatccatggtgatttacaaaaagaatatgctggcttttataaaggtaaaattgcggtagtgacttataataaaaagactttcaagagtgaacttgtacgctacttgaagttgtctgattatgctactgataaataaaattaaagagctcaagaatgctttaatgatgaagcatcttgagccttttgatttgtagtaaaaaaatatccaagaccgaaatcttggatactcattggagctggaactgtgcttgatgaggcaactgctagaatggcgattgtttcaggagctagattcgttgttagcccatcttttaacgaaaatactgctaaggaatgcaatctgtatgcggttccttacatgcccggttgctttagtccaacggaaattcaatctgctttaacttatggtgctgacgtagtcaaaatcttcccaggttcaattgctggtaaaggcattatttctgaaattcatggacctttcccatatgttaatgtaatgccaagtggtggtgtatcattaggaaatatgcatgaatggtttgctagtggtgcctatgttgttggtgtaggtggcggattagttggacctgctaaaaatgatgattataaagctgtattgcataatgctcaagcttttcataatgaatttcaaagtattatttatgccaactcagctgctactaggaaggtgccagtgagggcatagtttttttactgggggggaatatgatgcccctattaaaaaaataaattaatgaaataaaaaaacgtcgaatccattcagattcggcgtttttgattaactaaatatatttgttacttagtagttgaaacgtatgatgataatacatccttcaagtcgctatccttgattgaaacgtcagccttcttcaaaacagtagcaataacgtctttcatagtagcttggtcttgagccattgatgcgtaaatttggtcatcgatagccttcttgtgatcagcaaacttacccttagctgggtggctgatcatcttgattacgtggtaaccagattgtgacttaactggagttgaagtaacttcaccagtcttaagcttgaatgctgcagtcttgaatgagctgtctaaagtagtgtcagttgagtcgaatgatggcaacttaccagccttgttcttagtagcagtatcaagtgagtacttcttagctaaaaccttgaagctcttgccatctttcaattgcttgatgatgctttgagcagttgacttcttagcaaccaagatgtgttgaacagttaccttaggttggtagctcttccaagcttgttgttcttgcttcttagtaactttcttaatgtgcttcaatgcttgttcagaaagaaggttagtcttaatgttttgcttgaagcttgaagcagtcataccgttttgttgtaaaacagcactaaattgtgagccgtattgcttcttgtagttgttgtattgcttgtcgactttcttttgagatacgtacttgccgtattgttgttccaaagcgcggttgataatcatattagccaaagttgacttaccggcttgtgacttcttcatttcatcgtagtattgttgttgagtaatcttaccgcccttgtaggaagcaacagtagccttagtgccgctattagaacaagcagcagttgataatgcaacgccagctacagctacgactgcagcaatttttttcatataactcttcataaaaataatatctccacatccttaaataagtaactgttcattaatataccataaaaaagggcgtttcgttttcaaattacgaattttcacagaaaaatcaaattttctttattttttcttagttctttgtgtcttgtgagttagtatctggcacgatgttttccaaatcttggttcaatttatcgctctttttttctatgcggttaacgataggttgaatatggtcggaataatgttcaacactatcattaatatcactaattgtacgttcagctgttggcatttgttcatttaattcttgactagcctttttagctttttgcaaggcagaattaaagcgttggctttcatgtttaattgcttcgaactcatcttttaatggcttgcctgggcgattaccattgctatctttcatacaggaaaaaactagcccagctgttgcaccaaaaactgtgcctaataagaaatgtttcatttttaacctctaaaattgtgccttaattttgttagcaacttcgttgtatttagcttcatcgtatttgtcagcgttgttgcgggtcatcagcttcaagccatcgccttcaaaacgaggaatgaagtgaatgtgtgagtgcataactacttgatttgcggccttaccattattagtagtaatgttcattgcagtaacattagggaaggctgccttaattgcattagcaatttcaggaatatattgtaaatagcgttgtgcgtcttccttggtgtagtcaaacaagttaacgatgtgcttttttggcaccattaaggtgtggcctgggttaacttgagaaatatctaagaaggccttaacatcgtcattttcaaaaacggtatagctaggaatttcaccgcggataattttgcagaataaacaatctttgtctaaattttccataataaaacctcatatccttgtactttagtttactattaaatccatgctatcataataaaggtataaattcagtaaagaaagataggaaaaatgacattaaaaattgaacatttaacgggaggctacacgggtgtcccggttattaaagatattaatttggaaattaagccgggtgaggcactaggcttgattgggctaaacggcgcggggaagtcaactacgattaaacatattttgggtttacttcgcccgcaaaagggtaagatcagcttgaacgatgttgtattgacgcagcaaccaactaagtttaagcgtgaagtagcttatattccagaaacaccgattttgtatccggaattgactttaaaggaacatttggagctaaccatgttgagttaccacttggatgaaaataaagcatggaaacgcgcacatgagctgcttaagatgttcagacttgatgacaagctagaatggctgccgattcacttctctaaggggatgcggcaaaaagtaatgattgtctctgcctttttagcagatactagtttgcttgtaattgatgaaccatttactggccttgatcctttggcagttgctaacttaatcgatttaataaaaaaagcaattgctgacaaaaagatggtcttaatgactactcacgttttagctgatgcacagcaagcgatttcgaattatgctgtgttaaaccgcggcacgatcgaagttgtggggagtttgcaagaaattcgtcagcactatggccttaagccagatgatccttttgacaagttataccttgctttgaatagagaggataatggcaatgcgtgagttagcgaatagaaggttgagcgagaatcttaaacaatcagtaaaatatttgacgctggtgtttaatgacttctttattttagcgttgatctttttgtttggggcgctgatgttctggtatgcccaagctatgcgcgtaattcccaataatctgtggttctataagccacttgtcggctttatcatgtggttgccattattagctggtcgattagttaccttattaaaagaggccgacatgcaatttctgtttacgcaagatgaacaaatgggtgaatatctgaagccgatgattcgttacagtatggtgctgccaacaattctgattgttttgcttggcggaattctgtttccgtttgcgacggtaaaggctggaatcccagtttggtcatatgtaatcctgattatcagcactgttttattaaaattgtgtatgttgctgattgaaaaagagagtttgtacttctactacaattatccgcaatggatattattagtggtaactctggcggctttgttgattggctcactaggatcatttatttatccaattgaagttgtagtattaatggtaattacgcattttggtactaaaaaagaaaagggcgtctttaactggcgctatgcgattaaaactgaacaagctagaaaagatcgcgtttattcaatcttcagtatgtttaccgatgtggcagaaaagcaagttacaatcaaacgcagaagatacctcgactttcttttaccaaaatcattggctaaggaaaatcctaatttgttcttgtatcggagatcacttttgcgtaatccagaatacttgaacttattagtcagaatgactgtctttgcaatcttggtatcgtggttagtgcaagattggcgttgggcactaggcctttcatgcttggtaatctttttaacggtctatcaattattgccaatggcaacagagtttgaccgcaacttcatgtaccgcgtttacccaattgaacggcaaaatcgtggcagggacttggtagaggtgttgacaatgggcttgtttattcaatggctcttgattagtgtctgctggttaattgtgctaccaattaatgttaacttgtttgaagcgatggcaattttacttggtttcactatgattgtaactgccacttacttgccaggcagagttaaaaaaatgaatcaaaaaaattttggaattagataggaatagagaatgagattaagaaataaaccttgggctgttaagcttgtaaacgaccatccagaaagtgttttgcaaaatcctgatcctgaaaaaaagatcgactggactgaacgatttggtaatgatcatcccatcgaaattgaagtaggttctggtaaggggcatttcattactacgttagctgaacaaaatcctgataaaaattatgttgcattagaattgcaaactacggctgcggggattatcttgcgaacaaagttggaaaagggcttggataatttacaaatcttacgcggggatgcggctgacatcaactgcttctttccagcaaatagcaccaatgttatctacttgaattttagcgatccatggccaaagactcgtcatgaaaagcgtcgtttgacttacaagagttttttgagcaagtatgaacaagttctgaagccagaaggacatattgaatttaaaaccgacaatgcgggcttgtatgcttactctgttcagagcttgaataattatggaatgaagtttgattttgtttcagttgatcttcatcatgaaaagccagagattgtggaaaagaatattgaaacagaatacgagcataaatttgcagctaagggtaatccaatttatgctttgcacgctcattttgaggatgaatagtttgaagcgtctagagttacagcagataaactctaggcgttttttaatgctttattggataaaatcttgctactagctcatcgctttagttattttgttttagaatagaactgtaagatttcagattattggagggaaaattatggaagataaaccttattatgaacaagaatatcacgaacctaaaactgatattcctagaccaacttttggacaagcattcaaacttttgtttactgcaccatttaagtagaatgcacgtagtactcgtcgtggattttggtatgcctatgtttgggcaattattttgctagtcattttagcagcatgttcagctacggcatattcaattgatggcattgcttattcaagtaatgaattcttcttattaacgcacgtttcaactggtacacttattattcaaataattatctatctactgattatttggatcttattaggcttacttggctttaccataagaagattgcatgatactgaccacaccggttggtggtactggatctcggttattccatttgggtatttgtttttactttacttcatggttttgccaactgttgaaaaaccagttcgttggggcagttatctatttaaagaaaagaaataattgtaagactcaatttctagctttttagttaaagaatggttataataatatcaacttataaaaagtaagaaatacatgaggtatgaaaaatggaaaagattaaagaattaactgaagatcaattaaaggaaattactaaagaaggacgtactgtgcttgaattctcagctgattggtgcccagactgcaagtttcttgctccatttatgcctgaaattgaaaaagatttttctgatgcaaaattctacgaaattgaccgcgacggttcaattgacatagcaaaaaaattaatgattatgggaattccttcatttgttgtctaccaagatggcaaagaaattggtagactagtaaataaggaccgtaaaactaaagatgaagtggaaaactttttacgatcacttgactaatagaggagaaaaaaaagcatgattactagtactaataaagaagcttatcctaacactttgatcgttatcttaggtcacgatgaaggccgtagctcatttgaggaaaaagaagacgttactcgcgtaactaacgatgaaggcaagaccattggttacaacttcttcaacgttgataagttagttgactttgataagttaccaaatggtccagttaagttgtcagacgatgagcttgttgcactgaacaagaagcttgatgaagttggttttactgacaagttagcatatggcaagccaactttagtttatggctacgttaagacttgtgaaccacaccctgattcagatcacttgcacgtaactactgttgaggttgctgatggtgaagaacaccaaatcgtttgtggtgcaccaaatatcgctcaaggtcaaaaagtagttgttgcacttccaggtactttaatgccaaatggtgcacaaatttggccaggtgaattgcgcggtgttgattcatacggcatgatttgttcagctcgtgaattaggtttgccacacgcaccacaaaagcgcgggatcatggttgttcctgatagcttcgaagttggtgcagaatttgaaccaactaagtgtgatgaattgattgctagtggtgaaattactttataatttgaataaagcaaaaataaaaagttaaccagttggtgcaaaaaagctaattgatcaacttttttattttgtctaagaaaagccaccagtttcaccttttaaggagctagtgaaccaattttgtgggaaatagttttacccgtaaggtctttaatgatcaaatgatcgacagtattaacataattgtcgttttcatcatagatttcttttgattttaaaaattttagcataagaaaaatggtaaaataattaacgaataaaaacgttgaaatttcgagggacaaataatgttagataaaaataagcaaatttggtttattggaatcaagggtactggaatggcatccctggcactgcttttacatgacttaggctataatgttgccggcagtgacatcgagaaatacactttcacccaagttccacttaaaaaggttggaattgaagttaagaattttgatccagctaatatcaagagcaatgctgagcaagtaattgttaaaggaaatgccttcaaggaagataacccagaagttaaggcttgcttagacaaagatgttaagtggcagtcttacccagatactgttgaagaagttgttcaaagtcatacttcaatcggtgtttctggtacgcacggcaagacttcaactactagtttgctagcccatgtgctcggtgaagtcgctccgacctcatacttaatcggtgatggtcgtggtaaaggcgttgctggttcacgtttctttgtatatgaagccgatgaatatcgtcgtcactttttggcatatcatccagattaccaaatcatgactaacatcgactttgaccacccagactacttcaaggatcaagccgattacaccagcgcttttcaatcagctgctgatcaaactaagaaggccttgttcgtctggggtgatgacaagcgtttgcaaagtttgaagaccgatattcctaagtacacttatggctttaatgatactgatgactttcaagctactcaaattgagaagtcgactactggttctaagttccacgttttggctcacggtaaggacttgggcgaattcgagattcacctctttggtgaccactcaattttgaacgccactgctgttgtggccgttgcttacaccgaaaaggtgccaatggaagacatcaagaagggcttgccatcattcaagggtgctaagcgtagatttagtgaaaaggacttcggcgacattgccgtcatcgacgactatgcacaccacccaactgaaatgcgcgccactatccaagctgctcgccaaaagttcccagacaagaagttggttgttgtgttccaaccacacactttctcaagaactaagaagtatcaaaaagacttcgaagaaatcttgcgtgacgttgataaagcttacgtaactccaatctatgcttcagctcgtgaagctaacggtgatatttcaagtgaagacttggttaagaatattcctggctcagaagtaattgacttagacaatattgctgacttgactaagaataagaattcagtcattgtctttatgggtgcaggtgatattcctaagtatgaagatgcttttgaaaaattgctttaattgaaagataagcatgaaaaaaactgttctcaataagagagcagtttttattttggctaatctttgattttatccttgagatccaggctcttttcataaataaagtaaccgatgatgcaggtgatgatatcactggctgcttgagcccaaacgataccgtggtagccaaatgtgacttttagaatttctaatgcgataaagtagacaacgccttggcgaacgatggccatgataaacgctgcccatgcattaccaactgattggaagacggtagtgtaaactaaaatgataccaacgattgttgtggtaataatagtggcaattaacatataattaccagcgttaacgatatctggttgattcataaatagagcggtgactggacgagcaaataaaattaataatccgcctgaaattacagcataaacaacttgcacaagaatatcgaagtttagaattttctttaatcgtttccagtttttagcaccatagttgtaaccaattaaaggttgtgaaccaaaggcaaaaccaacgattaccaagataacgatactgtaaatcttttgggtgattcccattgcggcaactttgtttgcaccgtatagagctaaagatgagttaagaagtgccatgccagagctttgagcgaagttggtgattgaaccggggatgccgattgctacgatatctttgattgttttgccgctaattttgctatattttagctttaatttgatgtagtcagttttgtataaaacgtagtaaatgagaatagcatcagtgactagataacctgtaacgttggcaatcccaacaccgattgcacctattttgaaaacaaacaagaaaataggatcaaggatgatagctaaaatggttcccgtcattgtagcaaccattgcttgggtagctaaaccttctgttctgattaagttctgcggaatgattgagaagataattggcgcagcaccaattgatattacacgataaaaatcggcagcatcttgataggtggcagcttttgctcctaaaagatgaaggatcggattttctaaaattagtaaaatggctgttagtattaaaccagtaacaaatccaccgatcatacaaaaactgcttacacgtttacttaattgataatttctttcaccgaatagccgtgaaattagtgaagatccaccgagcccaaaaatgtcagaaacagcgattaaaaaagtaaaaagtggagcaccaatcgtaattcctgctactagatttgtatcacccgttttggcaacaaacatcgtgtctgccaagttgtagatcatggtagtgatcatccctaagacgaccggtaatgctagcttaaagtagaccttttaatcggcgctttagcaaataattcatccataaattttccccccacattgaaaaaagcgacctagaaagatactttgaggtaaacctcactattctaggtcgctacgttatatcatttatttaattttagcatattgtgttaatttgcgaggtgattatctaaattaaagttaccttgaaattcatcagtagtgctttcttgatccataccatattcggcatcgtcgccccagtaaatgtattgtgcgtttttacctttggtgccagcaattctgaagtaaaggccagcttcatcaccttcaccagtggtcttggtggcatctaccttaactttttgaccaatcttgagcaacttgctggttgatttaagcttattattcaaaacatggattttgtttaaaatagtggcggtagtggtgccagaagcttggtaaagggtgttgccgttgacaaagccaacatttgaagcatagatataagcgccattacctaaggcgtagaatggcttacccttgatagtggttgtgttcaaacttctctttttagacccgctaagatttgagaagtagtaaaatacgtcattcttagttgtggcgtgggttttagctggtgttttaactaacatatatttagggatgagtgacaaaccattgaaagtagtgcggtgaccgtttttatcataaatgcgagagttggaactcaagattaaaacattttgtccatccattgagctaacattcaaagatttgatgtagcgttttttaccgatgttaacgtaagaagcggtagtgtagtggtagttcttagaagtttttgcatctacttttttaccttggatcaggataggcttgccataatatttaaaacttgagcctgatttaatcgttgaagcaacagtcatcttcttgccattgactttttgggtagtggtagtggcattgcctttgctgttgaagacttgaactgtgccgttaaaggatttcttgagagtaactttacctttttgtgattgcgtagctgcttgaactgtgtgaacaggttgattgataatagcagctgctggtgcaacactgattaataaagctgctgcgatagttgctaattttttagtagtcatattttgtctcctttgtaataatcccttaagttgattttagcacttatgagactataaaaataacctcgaaactcaaacgttttcggggttatttgattttattcacttaagtacttaggatcaataaatttattgatcacgttgttaaccttctttgaattattgtacttgcggataatgttcaagaagtcttgtgcagttgcttgcttcaagcagtaagtttgatagtaatcgtgtaaagcatcgaagaacttgttttcgcccatggcaacctttaaaacagcagggaagtccatcccaagttcgtaagccatgtcttcagtgtcaacgccctttggtggattattaacagggtagttgatgtagttggccttttgattcttattaatgaattggttagcattttcttttaagattttgttagcacgcttgacgttcttacgagtatagaacttgctgtgcatcagtttagcacagtaagccttactcttagtgtaggtcaaatcgtaaacgccattttcaaggatgttggtaagaccttcgtcaagccaaggttccatgtattcgtcgctgccgacagtgccgtagaaccattggtgaccaacttcgtgagaaacatcttcagttaattcattatatctatcaagtgggtgcttctttagtaaaaagccgctggcatcgatcatgatcaagccaggatattccatcccaccggtatctttgctaagcaagccttcagtaatatcgatttctttgtaaggatatttgccgatctttttggtaaaaatgtgaaaactgtcttgggcagtcatcaaagcaagcttgttgtattgcttgctgtttttgcttgcaaggtagtagtcgttgattcttacgccgtttgcataagcgtggtcaatcttgaacttgttggaagtagcgattgcgaactcacgcatgttgttggcggtaattgtagttttgccatttttggttgtgctttgaccagaagcggcaactttgtagctctttggtgcgaagaagctaacgtggaaattgcttacagcactgttgcggttttcaccagcatcgtagtatgggtgataattccacttaccgttgcgataatcgcttaagtatgggaaacagaatgacaggttataaaccttaccgccgttgatattttggtagccaaaacgatcttgtctcttaggcacgccggtaactacgttgacagttaaatcagtagattcacctatatttagacttttgttaacaaataaattgctcttgtctttaccggtagtgtaagaaagcttttgaccatctgatgaaatgcttttaactgaagttgtcgcatttcttgtagcctcaaaatgcttgtggtcgtatttcaacacgccgctagcaatatttctaaccaataaatttttaacaggttcattaccgttattaacaacgtgcatggtaactttttctgttaattgattcttgcgagtgtccaacttcacgatcatgttgtaatttgttgccttgatcgtaggatcagccgcagcttgaacttttgagttgaagctaaataatgccgcaatggttactgcactcgacaataaaagtgttgttcttcttttcataattttccctccaagaaaaatttattctaattattggaagttatcagcataaagtcaatctattttttgatgataggatataatttatgtataagtgaaaatgaatagatataaagaaagaagataaataagaatggttaaaagtattacacctcatttgttttatcgcttgaatgggatgcaccatgttgtagcccaagttggtgtagtaaatggtgatcatgtttttgccttgcaacttcttcacagtgcacatgatgtgttggtttatagaaaacatgaaggtttaactaagaacatcgattatactgatccacacttagtaatgatgggctttggccacacgcaaacctgggtagcagctaatgacaaggatgaatatttcgtaggtgctaaaccaaattcaggcaactggactactcaaattgcacgagtaaagtacccaagacttttaccagaaagatatacttcaaatacacaacttccacgtttgtcacacttgaatcacgtaaccgacgttccttatgatggtcatgatcacttgcacagagtagaagcttcagtttcaccaaatggcaagtacttcatgattgcttcaatttgggatgatggttcaggtcactttggtttgtttgacttaaatgaagtaaaccaaaagttgaatgaaaatggcactaagaacacgccaattactgatttgcattgccttagtgcttttcacattgataactttgatcatccaagcgtggcaccaagtgaagaagctccacaaatgattgattctgttcagggctacgccattgatgatgacaagaatatttatatttctaaccaattgtcacccaagattgatcatgcgaatggtgaagttactacttggtcacgtaagatcgttaagtttccatggggtgaaactaatccagagaactggcaagtagcaatgattgatggtattgatttgcctgatcgctacagtgaagtagaaagtattcatgttcaggcgccagatgacatttatctaactgtggcttaccaccaaaaatatgtcaaagatggcgagtttaagttaagaactttggagaatcaaattttccacattagtgatttaggctaaaattagattcttgagactactgcaaaaggtagtctttttatttttgtaaaaaagctatgcaatttatatgcaaacgatatataatagtggtaaatagaaaggagagggtaccatggctgagaaaacaactggactttatgtcagaatgaatcctgaaaagaaagaaaaagcagaagcaattttaaagcaattaggtttgaattcagctactgcaattaatatgttttatgatcaaattattttacgtaatggtattccttttagagttgagattcctaatgcttgggccaacttggactacatgaacaagtatgagtatgctcatctacttgatgaaaagcttaaccgcttggcagagcagaccgatagttcactaggtgaattagccaagggagtcgatcccaagaagaaggacgagtaatttttagttgaggtataaaaatgggtattgttattacgctaatcgttttagttttagttattgcatatatttgttgtggttttagaattgtaccccaaaataatgaaggcttagttgaaacgttgggtaaatattctaaaactgttaaggctggctttgtctttgtttggccattatttcaacgaattcggaaagttccattggcattgcagccattagaaatttcaaagtattcaattattactaaggataatgcagagattactacttccttgactctgaactacttagttactgattcataccgctacttctacaacaacaccgattcagttgagtcaatggtgcaattaattcgtggtcacttgcgtgacatcattggtcgaatggatttgaatgcggctttaggttcaactaaggaaatcaatgatcaattgtttacagcaactggagatctaactgatatttacggaattaaggttgtcagagtaaacgttgatgaacttttaccaagtccagaaattcaaagagcaatggacaaacaattgactgctgatcgtgagaagaccgctgctattgccaaagctgaaggtgaagcaagaacgattgaaatgaccactaaggccaagaatgatgctttggttgcaactgctaaagctaacgctgaagctgttaaaacacaagccgatgctgatgcataccgtgtataaaagatgcaggatgctttagctaaagctggggaaggctacttcagaaatcaaagcttagacagcttcaatcaattagcacaaggtccgaacaacttgattgttgttggaaaagatgagatgacagatttaggaaaggttccagctttaaagaaagtatgggatgaatctggcagtcaggatgacgctgaataatatggaaaagcacttacgtgcttttttgttttgattactgattgataaaatccttttttgacaaagaatttaattaaatttttgagtaaaaatcgtaattaacagagattcactattttactaaaacaacatgctgaaagattagtatgaaaactggtaaaatagataagtaaaagaatagatctatttgttaaaagggagataaaatggctgataaaaaattacttctaatcgatggtaactccgtagcttttagagccttctatgcactttaccgccaactagaatcattcaagagcccagatggtttgcatactaatgccatttatgcttttaaaaatatgctcgatgtactcttaaaagatgtcgatccgactcatgtgttggtggcttttgatgtgggcaaagtaacttttagaactaaaatgtacggtgactacaagggtggtcgggctaagacgccagaagagttgttagaacaaatgccgtatattcaagagatgctacatgatcttggtattaagacttatgaattaaaagattatgaagccgatgatattattggtacttttgctactaagggcgaagaaaatggttttattactacaattgtaacaggagaccgtgacttgacgcagttggcttcagacaagacaacggttgaagtgactaagtcaggtgtatcacagcttgaggcttatactcctgaacatatgaaggaagtaaatggtgtaacgccaactgaattcattgatatgaaggctttaatgggagattcatcggataattatccaggcgttgaggggattggtcctaaaacagcttctaacttgatccaaaaatatcatacagttgaaaatctgtatgatcatattgatgacttgaaagcttctaaacgaaaagaacgtttgattcgcgataaacacaatgctattttaggcaaaaaactggctacaattgatcgtcattctcccgtgacaattgatattgatgacgttaagcgccaaccaattgattatgaaaaattacgccaattctatgaaaagatgaatttccgtaagttcttggcagaactgaatgctagcggtcaaggccaagatgcaactgaagtagaaaaagttgaatacacagttcttgatgaccaaaatgtcaagaaaatcaaagctaatgcagatgaccaaattgaattttatcttgctatgctaggtgctaactatcaccttgctccatttgtcggttttgctttaaaaatcaattatcaaatttacgtttcacgagatgttgaacttttacaagagactaatttgcgacatttattagaagatgagcaaattaagaaaaatgtctttgatttaaagcggacaatggttggcttacatcgattaggtatccatgttcacggtcaagattatgatatgttgttagcttcatatttgatcaataatgaaaataattccaatgatctaggtgaaattgctcacttgtatggtgattattcagttaaaaccgatatagaaatctatggaaaaggcaaaagtgagcatgttcctgatgacgatgaagaactatttaatcatttggcttcaaaggttaatgctatcgaaaacttgaagcagccactacttgagaagcttaaggaacacgaacaagatgacttgtttgatacaatcgaaattccgactgctcgtgtattagcccggatggaaatcaacggaatgaaagtggaggcaagtactctgctcgaactgcaaaatgaatttgctgttcggttaaaagagctggaggataagatctatcaacaagcaggcgagcgctttaacttgaattcacctaagcaattaggtcatattttgtttgaaaaattgaatttaccagtaattaaaaagaccaagaccggttattccacttctgttgaggtattagaccaattaaagacacaaagtccgattgttagtgaaattttagattatcggcaaattgctaagattcaatcaacttatgtcaagggcttgcttgatgtgattcagccagatggtcgcgtacatacgcgttatctacagacattgacagcaactggtcgactttctagtgttgatcctaacttgcagaatattcctacacgaactgaagaaggaaagcaaatcagaaaagcctttgtgccaaccaatcctgatggttacatcttctcttgtgattattcccaagttgagttgcgggtattagcacatgtttccggtgatcagaatatgcaagaagcctttaagacaggctatgatattcactcacatacagcaatgagaatttttcatttagattcaccggatgaagtaacgccattgatgaggcgtcatgctaaagccgttaacttcggtattgtttatggtatttctgattatggtttatcaaagaatttaggtatttctagaaaacgtgctcaagagtttattgacaattactttgaacaatatccacaaattcgtgaatatatggataaggctgtgcaaacggctcgtgaaaagggctatgcagaaacaattatgcacagaagacgctacttgcctgatattcatgctaagaaatttacagttcgttcttttgctgaaagaactgcgattaactcgcctattcaaggatcagcggccgatattatcaagattgctatgatcaatatgcaaaagaagctagatgaactacatttgaagaccaagatggtcgttcaagtacatgacgaattgatttttgatgtgccaaaagatgaattagaaacgattaagaagatagttccagaagttatgcaatcagcagtgaagcttgatgtgccattgattgcagattctggttggggtcataattggtatgatgcaaagtaggtgatttaatgccagaaatgcctgaagtcgagacggtgcgacggactttaactccgctaatcgttggaaaaacgattaaaaaagtagtactttggtatcccaaaattgtggcaacagaccataagaaatttatcaaagaactaccaggtaaaagggtcttaaagattgatcgctatgctaaatatttactgatacgcctaagtgataatttaactattgtgtcacatttacgcatggagggaaaatatcatttaaccactcccgatgcgcctaaggataagcatgaccacgtagagtttatttttactgatcaaactgccttgcgttataatgacgtgcgtaagtttggccgcatgcagctgattttaacaggtactgagcgccaagtgacggggattggcaaactgggccctgagcctaatagcatagaattttcgtcagattattttatcaaggccttgagccgtaagaagaaaaatattaaaaatgtcttgcttgatcaaacaaccgttgcaggtttaggtaatatctatgttgatgagacactgtggcagagtggaattcatcctttgagtgccgcaaataaaattccagcagaaaaagcaaaagagctgtggcagaatattaaccaaactattaaaattgcaacaaaaaagcgtgggacgactgttcatacttatttagatgccaacggaaatgttggtggctatcaagaaatgctcaaggtttatggtcatgcaggtgaaccttgtgcaaagtgtggcacggaactagaaaagattaaagtatcaggcagagggacaaccttctgtccacattgtcaggtggtttattaatgagctatgttttagccttaactggtggtattgcaactgggaaaagtacagcggaccagttttttaaagcaaataaaattcctgtgatcgatgatgatcagattgctcatgatttgatggagcctgggcaagcttcttggcaggcgattaaagattattttggctcagagtatttaaatgatgaccaaacgattaatcgaaagaaattagggcaattggtatttaaggattcgcgggctttaactaaattaaatgagttaacgcatccgttgatttttttgcaaacaaagaaattgctaaatcaatatcaagctcaaccaatagttattcttgatgtcccactttattttgagtcagggatggataagaaagatatagctgacggtgttttagtgattactttgcctgagaaaatgcaattacagcgtttgaaggagcggaatcatttaaccgatgaagaagcaagaattcggatgcaaagtcagttgcctatggtcaaaaaagagcaattggctgattttgtgattgaaaatactggtacaataaaagaactagagaataaactagcacaattattggtaaagattagagaagagggatagctatggaatgtccaaattgtcatcaaaatgcttctcgcgttattgattcgcggcctagtgatgaaaaccgggctattagacggcgcagagaatgtgaaaattgtggttttcgctttactacttttgaacgagtggaaactgctcctttgttggtagtaaaaaatgatggtactcgtgaaccattcagtcgaaagaaaattttgcacggagtaatggcagccggacaaaaacggccaatcagtagtgaacaatttgagcaattggttgatcgtgtcgaaaataagataagaaaacaaggcgttagtgaaatttcatctaagaagattggtcagtatgtcatggatgatttggctaatttggatgacgtagcttatattcgctttgcttcaatttaccgtgagttcaaggatatgtctagctttatgaagacaatggaagatatgatggccaaaaaaggaaagggtaattagtcatgttcgcaacgtctgatcctaagcatctttattatgtagccaacaagattaccctttttccagagaatgagaaaatcttgattaaactgtatcagcctttggttggcgcggtggcaattgccttgtatcagactttgatcaatgactatgatccatatggtattgtttctgattcaaagggaatttattcactacaggagcaacttgattgtagtttaaaagatatgtttcattctttgcataaactggaagccgtaggtttagtgcaaacttttttagcggataatgtcttcaataatatcattgtttttaagttattacaggttcctagtgcagacaaattttttgcaacaccactgctagcaagtttgttgaaagaaaaagttggcagcccaacctttcatgacttgagtcatgcttttgctaaggaagcaaaactgcgtgaaaagccaatcaagaatgcgcgcgatgtctcagccaacttttttgatgtttttcgcttgccaggggatgaagcaattaatccatctaatgaggtagtagaagctgcgcaggaaaataaagcgcctgagatagaaactgctgaaattaatgcccaggatccaattgattgggatctgattaaagatcaatataatgtctatcaaattccagctcaagaagtagaaattaaaaagaaccaaattcggggcttaatacagacatataatttatcggaacaggaatttgtggatgagactgttccctgtttgcatggtacacataaattaaacatgcatgaaattagtaataccatagcagaaaattataaacgattgcatactagggaaaacattcaaaaacaaattgaagaaggcaaaaagcgcgctattgcgactatcaaaggtttggatgctaatgatagaaaactgttactcgaagctaatgaaaattccccatctgaatttttatacaaattaaaaactgaaaagggtggaattgtagctccaggcgaaaactatattattaatcagctgcacacgcagtatggcttgccggaagatttgattaatattttgattcatacctgtttgacctacgatactgttgtaacttctaatcgtgcttatcgaatagctaatgattggctgcaaggtggtattagtactggggtacaagctcttgaatatgtgaagaagcgtaaagccgatattcttaaaaagaaaaatcgacagtcatatcgacaaaataagcgagtcgaaaaaggtaccgattggagcaagaaaaaggctaaaaatgaaggtatgtcaacagaacagctgaaggatatctttaaggatctgaaaaataagtaaatagagggtaggtgaaataatggaagcaattggtgatttgcttaaaaaaatagttaaagagcgtaatttaggtaatgagaaagaactgttgaaaactgctttacacgatccagatgtgcaagcgtttttgcaggcaaatagggaaaaaatagataaggcgatgattcgaaatagtatggccaatatctatgaatattatgcgcaaaaacatagtcagaatcaggtgctggccggttatgctccgcaattatttttaaacggcaaagtaattgatgtacgttataaacctaccgaggctaagattgtagcagatcagcaacgagcagccaagcggcgtcttcatttaattgatctgcctgctaaattgcatgatgttaatttaagtgatattgaggttacaaatgatcgccagcaagctttaaccctgatttatgattttttgaaaaagtacaaagctgatcctcaccaacaaggcctttatttgtcgggcgactttgggatcgggaagacctatatgctagcgggacttgcaaactatgtagcaactaattttgatcggaatgttgtatttttacatgttccaacttttattgcaggtttatcaagtcattttggtgataacagcttgcaagatgagatcaggaatttagctgaatgcgatgtcttaattttggatgacattggggcagaaacattaagtcagtggtcacgtgatgacgttttaggagtaattttacaggcaagaatggataatgttttgccaacctttttctcttctaatttagatatggaagcattagagtcacactttgaggaaacccgtaatgcaactgatccagttaaagctaaaagattaatgcaacgagtacgttttttagctaaagaagtagtagtttccggtcccgatcgacgaaatttttcgcattaatttcaaaaagttcttgcatcgttcactttgatgcgtataattgaagttaattaaacgagacatgatgatgttcggctcagagagaaggacctagttctggaagttcttcattagaaaatcaccccaattgtttattcccaaaattgaattttaagaggctggatacctttatcaatctatacgagaggttagacgtacgctaacctgaattttgggtggaaccacgcaattaacacgtcccagtgcttttattagcactgggatttttttattggaggtaaaaatatgagtttttcaattactttgccagacggttcaaagaaagattttgataaggctgtttcagttaaggaagtagcttcatcaatcgctacatctcttggaaaagctgccgttggtgctaaagtaaatggcgttgttaagccacttgattatgaaattgacaatgatgttgaagttgctattcttactgacaaggatgaagaaggcttagacattttaagagctactgctgcttttgcacttgaagcagttgctaagaacaagtacccagaacttcgtttgggtcaacatgttgctgatgaaggcggcttttacgtagatactgacaaagatgaccaaattaaggttactgaattgccagaacttgaaaaggctatggaaaaattagttaagagtggtcaagcaattgaacatgttgtaatggacaagtcagaacttgaagatattttcaaggatgacccttacaagactgatcttttgaagaaaattgatgctgacaaggttgatgcttacaagttaggtgatttcgttgactttggctttgatgctttattgccaaacactggtaagattaagcacttcaagcttttgtcagttgctggtgcttactggcttggtaaatcatccaacccaatgcttcaaagaatcttcggtactgctttcttcaaggaagctgctttaaaggaagatttgaagcgtcgtgcagaaattaaggaacgcgaccacagaactatcggtcgtgaccttgacttcttcttcgttgatcctaaggttggtgctggtcttccttactggatgccaaagggtgctactattcgtcgtgttgttgaacgttacattatcgaccgtgaagttgctgacggttatcaacacgtttatactccagtattaatgaaccttgatgcttacaagacttcaggtcactgggcacactaccgtgatgacatgttcccaccaatggacatgggtgatggcgaaatgcttgaacttcgtccaatgaactgtccttcacatattcaaatttataagcaccacattcgttcataccgtgacttgccacttcgtgttgctgaacttggtatgatgcacagatatgaaaagtcaggcgctttgtcaggccttcaacgtgtacgtgaaatgactttgaatgatggccacacttttgttgccttggatcaagttcaaactgaattcgctaagattttgaagttaatcatggacgtatacaaggacttcgatattactgattactacttcagactttcataccgtgatccaaagaatactgacaagtactttgcaaatgacgaaatgtgggaaagaagtcaaaagatgcttaagggtgctatggatgaccttggccttgactatgttgaagctgaaggtgaagcagcattctacggtcctaagcttgatattcaaactaagactgctttgggtaatgacgaaactatgtcaactatccaacttgacttcatgcttccagaaagatttggcttaacttacgttggtcaagatggtgaagaacaccgtccagttatgattcaccgtggtattgttggtactatggaaagattcattgcttaccttactgaaatttacaagggtgcattcccaacttggcttgctccagttcaagttaaaattatcccagttaaccttgatgctcatggtgaatatgcagaaaaggttcgtcaagaacttgctaagcgtggcttcagagcagaagttgatactcgtaacgaaaagatgggttacaagattcgtgaatcacaaacccaaaaggtaccttacactttggtgttaggcgacgaagaaatgaagaacggtagcgtaaacgtacgtcgttacggtactgacgaagaaatttctaagagccttactgattttattaatgaaattgatgcagatgttaagtcatactcaagagaaaattaattaatataattaaaaaataaaataaaaaaacgtatgctatgccaggtctaattaagatggctttattgcatacgtttttttggtaaagctaatgtaattgattttttacgtttgtaagtaagaagtaaaagaactgtcatcccctttaacttttatgaaatattttaatgaaataatgaaaataggagttatataaggaaaggtgataaacttgaaaaataagctcattatatttatgacaactgcgctattcatgttagctattattgtaatgggtcaaaatagagtagatgctgcatcctggggagctaagaatttatttactacaccaaaggaaactcgcggaacatggtactataagcaagaaggcaaaataaagaagcttaaaattacaacgcatacatttaataaaatcaaattatataaaatgttgagcagtaatcaagcgattaagtggactaaaaaattagctaaaactgataaaaagtcggggtataaattagctcaaaaagttggtacctctcaatacgaagctactgattttaaattttataaaacagcaggttttgctgccaatggttggctttctagtgatagagctgattcaggacacacttatgttgctataaagaaaaaagataaaagtaataatgataaagtagatgcactgcggagactgtaaaatagtttgtgtaaggatgaataattccttaaatttatttctttaaacattagaaaaaggggttcctttctcgtatgattggtttgaacaaaaaaacacatacagaaagaagaactccttcatgaatgattttaccaaaaatatagcacaagctctattcaatccagacaaaataaacgatttattgcgcaaagagctacaacaggctgttaataacttgctagaagctgaattgactgcctttctgggctatgatccctatgccagaaatggctggaatactggcaattctagaaatggtgcttatttccgcaaggttgatacccagtttggaccaattgaagtgcaagtgcctcgagatcgcaacagccagtttcatcagcacacgctgcctgactacaagcagcactctgatgttttggaaagcacgattatcaagctctactccaaaggcgtaactaccagagaaatcgctgacttgattgagaaaatgtatggcagtcattatagtccagcccaagtatcaaatatttccaagcagatgctccccaaggttgaggcttatcacaagcgcaagctaagcgacaagtttttctgtgtctatttggatgcgacataccttcctttgcgccgagaaacgtttgagcgtgaagcagtctatattgccattggcattaaacctaatggacataaagaagtcattgactactgcattgcgcctagtgagaacattgaagtctggacagagatgcttcaaaacatgaagtccagaggcttgaagcaagttgagctctttctttctgatggtgttgttggcatgaaagcggccttgaccaggacttatcctaaagctcattttcaacgctgcctggttcatgtcatgcgcaatatctgtgctaaagtctgggtggatgaccgcgaaaagatcatgaacgaattcaagcagatacatcaacagacaagccaaaaagaagctgcagctgtcttgcatgaattttatgcaaaatggaataaagcttatagccatgttatcaaaggtttgagggaaattgagcccgatctgctggtcttctacaattatcccaaacaaatcagagcttcaatttattcaaccaacatgattgaatcctttaacaacgtcatcaagcgtaaagctaagcctaaggcagaatttccaactgaacagtcgcttgatgtatttattggcatccaggcaatgagctacaatgaccgctatttcaaccgaattcataaaggctttggtcaggttcaggacaccttagaatcctactttgattaaataaataattaaaaaatcaatttacgagaaagatctatttacacaaaagatttgacagtttcgcactgcgagtaggaaatggagcagataattcatttttatattattgttataagagcaaaaaattaatcaaataagttacccggatttaaaattgaagtgcaacactaattgttaaacaaaaaggccatgaagacctaaacttgaagtgaccaaaaatcaagaaaggaagatcttcatgaccaactcaaattctagcatttccaagcattatcatcaattgaacagcgaacaacgtggacaaattcaagctctgcttgattctggcataacctcctgcactgctatcgctcaagaagtaggctgtcataaatcaactatcagccgtgaaattagacgaggcagtgtcctgcaaagagacagcagctatgtcttgtatgagcactattacgctgatactgcacaaatttatcatgaaaagcgccgcagaaactgctataagtgtaatccactgcaacactatgccgtttttttcagaatgctaagcagacgctttaaagccaaatttgatgccactagcattgatgaattcgttggtgaatttcacaggattatgccaaattatccatgtcctagcacgcccactgtctatcgttatattgatcaaggattgctggatataagcaatatcgacctgccaatgaagcttaaaagacgcagaaacaaacgccatcatagtcatggtggccatgctccgcataaaaagaatcttggcaattcgattgaacagcggcctaaagaagttgaaaacagaaaagttcccctgcactgggaaggcgatttggttaaaggcgtcagacgtaaaaatcaacctgccttaatgacactgactgaaagaaccactcgttttgaggttgttatcaaaattcctgactatcgggccagtacttgtcaaagactgcttcaaaaggagattgacagacatcctaattggtttaaatcaattacgtttgacaatggttctgagtttgcggatatgaccaaaatcaaaggatgtcagatctactttgctcatccatattctccttgggaaagaggcacaaatgagaactgcaatggacttctgcgtcaattcttccctaagggcaaaagcatgaaagataagtcagctgcttatgttcaacaggcaactgatgccattaaccgcaaacatcgtcgaatcctccaatatcacacagcagaagaactcttcaagcaatacgttccttcatagcctaactgttgcacttaatttgacaattcaggatcaaataagttataataattttattgatgtgttcaactacatttttatatttttgcactgaaatcttaattcagtgcttttttcataaggattagactaaataagatgataatacgccagcgaaaaaattatttaacttctcaatttttatctaagattagtgccgatgggactttaaatattgaaaatttaattgtcctgacttgtgcaatttttattgcaagtattggactaaatgttaattcaacagctactattattggcgcaatgttgatttctcctctgatgggaccactactagcaattggcacaggtcttgctttatatgatgttcacttactgcgtaaaggaacaatttcattattagcagaaattattatcagtttagctgcatctacaatttattttcatttttctcctttgacttatgctagtcaagagattattgcacgaacttcaccaacaatctgggatgcgatgattgcgttttttggaggggtcgctggaataatcggagctcgcaaaaaagaagcaaataatattgtacctggtgtagcgattgcaacagccttaatgccaccggcttgtacgatagggtattcaattgcggcaggtaatcttaaatattttttaggatcaagctatttatttttgattaactgtgttttcataattttgactgcattcatgggtgtaaaaattatgaagtggttaagttattctactaagcaatctaagttgtttttcttgcacaagccgacctttaaagagtttgtgataattttagtagtaattattttaattattcctagtatcttgtcagctaatcagatggtgaataaaactctagtagatcaaaatgttcaaaatcttgttgttaatgaattaggcaatgttaatttaattaaggaaaatgttgatacgcaaggaaaaataattaatcttacagtttcaggcgataaaattaacgctaagaaaattcaagcggctaaagcaaacttaacaaaatatgacctgaaaggctattcactgaatattgtacaagtagctcaggttaatcccaatgcagaaaatcaattagatcgacaagtaaataatattattaatcagcgtcagcatgaacaagaacaagctgatgaaaaacgtcaacaagaacaagaaaaacgtaatcaaaaaattcgcaaactgtcatctgcaatatcttctgttactgcagttagtgataataaaaataagcaaattactttgatagagttaaaaaagccgctatctaagaagagaaaaaacgccttagtaagacaaataaaagataaatatccaaatattaatttagtggaatttgttcaagaaaatattaaaaattagaagaaactgtcaaattttttgtgtaaatagatttttctcgtagattgattttttaatcttttatttaatcaaagtagaattctaaggtatcctgaacctgaccaaagcctttgtggattcgattgaaatagcgttcgttgtagctcattgcttgaatgccaataaaagtatcaagcgactgttcatttgaaaactctgctttaggtttagctttacgcttgataacgttgttaaaggattcgatcatattggtggagtaaattgaaaccctgatctgcttaggatagctgtaaaagaccagcagatcaggttcaatctctttgagatttctgatgacatggttgtacgctctgttccacttgtcatagaaggcgtgcaagactttgatcgcagcttctttatttggctgttgatggatttgcttgaattcattcatgatattttcgcgatcatctacgcgtactttagcgcagatattgcgcatgacatgtaccagacagcgttgaaaatgagctttgggatatgtcttttccagtaccgtcttcatgcccacaacgccatctgaaagaaagagctcaacctgttctagaccgcgagacttcatgtcttgaagcatttccgtccaattctcgacgttttcgctgggagcaatgcggttaatcgatgacttccttgtggccattaggcttgatgccaatggcaatataaactgcttcacgatcaaaggttatgcgacgcaaagtaatgtaagttgcgtccaaataaatacagaagaacttatcgctaagcttgcgttgatgataggcttcaacttttggaatcatctgcttggagatgttagatacctgagctgggctgtagtgactgccgtacatcttttcaattaaatcggctatttctctggtggttacgcctttggaatatagcttgataatcatgctttccaagacatcggagtgctgcctgtagtcaggcagcgtgtgctgatgaaacatgccgttgcggtccctaggcacctgaatttcaatctcgccaaattgcgtatcaactttacggaaataagcaccattgcgtgaattgcctgtattccagccagctctggcataaagatcatagcctaaaaacgcagtcagttcagcttccaataagtcattaactgcttgctggagttctttgcgcaataaatcgtttattttgtcttgattgaatagagcttgtgccatatttttggtaaaatcattcatgaaggagttcttctttccgtatgtgttttttgttcaaaccaatcatacgagaaaggaactcctttttctaatgtttaaagaaataaatttaaggaatcattcatccttacacaaactattttacggtctcattatatctgtatattaatgcacaaatgctgttatatcaacgattagatacttcgctttataataaacagtgttattataaagatgccgagagggatagaggcaataaagaattagaatcgaaaggtgatatatatgttagatgttttaaataacaaagtagaattaagcaacgtacattttgcagaacacaaattagcaattgaagatgctaaaacaatgttagaaaacgaaggttggattgctactaagtaaaaagtgttgataattatgaaattaaaaacagaaaatgagacgcacgataaagtacctcataactgctataaattagctagtagttatgagtcgttttttattttttgcttgttatctattgatttgtagctaattctatatgacaatgatatctaaattattgaactataataaaaatccgttattttaatttggtctaagttgctatatattcaaaaaaatcgttaaatttttattatttatttggcggaatatgatatgaagaaacgtttcaaattagctgctatttttgtggctgcaatgttcgcagccgcacccgttgttggtatggcagaaacatcaactactgtttcagctgatgctgacatcatgcaacaatacacttttaatgactcagttttggactttactcctactttaaaggtttatattgctaagggtcacaaatttaccaccagtaaagaaactgcttacaaggcaaaataattaggattgattccgaaaatatagagctgttagatttaccgtggtctagcagcttttttgatgcaaaaaaataccactcaccgttaaatttagaccattcacctgaatttaataatttaacgaaaataagcaggtatactaataatcaatcaaggagggatgcaattgaaagttaaattgaatatcgatccaagtttaccagaagaaaaagctgaattttggttaaagaaaatgactgctagatttgaacggattactaaagagttgaattcggagcaggattttctttggtgctatctagatggggatgcctatgaaattaatttttctcaaatctatgcaattcaaatagaaaatgaaaaaacaatgatttgtactcaaaatcaaaaatatgtttataggggcagattgtatcaagtacaaagtgttctacctaacgattttataatgatttctagaggtgctattgttaattatcattttattgatcatctagaaattataaatacaggcaatattgatgcgcttttggagaatggactaagagtacaagtttctcgtagaagaataaaggatttaaaagagaggctaggattatgaaaaatattaaagatcttttatataacggtctgattagtggactgattggtattggtatcggtacgatctggatggctatggacttcttgttttcactaaatggtcaaaatcctgcaacagcgaagatatatttgaaaacctttcttttttggacgattatttcttttctcattggtattttcttttatctagctagctggatttttaatagtgaaaaatggtcattgaaaaaacaaatttttattaatttcttcgtctgttttgttgcctggttcttgttaaacctcctaattgataattttagtatttcactaaagatggttattagagtaacagttgattttattattatgtacgctattgcatacggtggatattttttacatttatggaacactgttagacgaataaatgcaaagttaaaggaaaaatagaataccataattaaaaaatgaaagaggtacccttgcatgactttattatctgtaaataatatttcaaaaacatatcaaaaagcacataaaaaggcggtatctgatgtttcatttaatgttgatagtggtgatattgttgccttcttaggtcctaatggtgcaggaaaaactacaacattaaaaatgattcttaatttagttagtcctgataaaggaacggttgtattcgacggaaaagatgtaactcacaacaatctctttttattgaaaaacactggcgttttattagaaggatctagaaatatgtattgggccttatcaccaatggaaaattttgtttattggggtggccaacgtggtttaagcaagaaagaggcagaaaaaagaggagaaactttcctcaaacagtttggtctgttggataagaaatacacctctattaccagattgagtagaggtatgcagcaagttgtgggaatttgctgtgctatgattgccgaaccaaagcttttaattttagatgagccaactttaggtttggatcttaatgctactcaaataatgattaagagtctgaatatgttatccgccaatggagtagggattctagttactacacatcaaatggaatttgctcaagagatagctaataaaattttattaatcaatcatggtaaacttgtcttttctaatagtataaaagatagtttgaagaagctgaataaacaagaaatttttgaagtgcatttcacccaagaacttaccgcctcagaaaaagaggatatacttgcaagctgtgaacttacaaagaagactgacggagtttatcgtttgggtgttaaaccgcaagcatctctttcacaagtacttaaattattgagtgaattaccaataagtagtatacaaactgtgactagaggattagatgaaatttttaagtactacacggagaaggaaaaatgataagttttaaagctgaattttggcgtcaattctatttatataagagatacctcttcaattatatttcagaatttttcttattaattttaatgtttatggctattttttggggcggtagccttgtaggaggtggcgttttaggaaaatcattgaatgccctagtagttggctatgttttgtggagtttaattgaaaacactattagccaaatgggctaagtgtataattttttacggtaagttgaataaataattaaaaaagcccaagtcctttgaatttggacttgagctcaaacaaaaagaccagtagtctgatgttaagaacaaaaaacacattagaagctggtcttttatgaattcaattgtaactgaaatcgcaaatattataaagtctgaagataattatattaagcgtgaaagaaaaataatctgtttcttcttaaacctgattaaggaaatcatggccttggctttagctaaagttgatgatgaaatgattaccaaggttaaagcacagggctatcagattgataagaagaatgagcgctcaatcaatatggcttttggcgaagttaggtatgtcagaagaagatatgtctgcccaggcaaacaagcaaggtatcccttggatgaattaatgggctttgacaaatacaagcgctacagtattttagcagtcaaaaacatcttagaagtaagcagcgttgccacttatcgcaatactgctctagcagtcaattgcctgtctggctttaatattagccatatgcaggtgggcaatttggtaaaaatggccgggaaaaatattaaagcgggccaagaagcagattcaagatatgatgccgcaggcactaagaaaaaggtcccagttttgtatcttgaaggcgatggcgtggtgatcaaaggcactaaaagccggttggaatttcatcgctatcaggtctgtgaaggcattgtcaatataagcaagaaacgcagaaagcgaatcaatgccaaggaatttgtttctttaagccgacttgatgcgctgaacgaagccaaggagtacctggccaatacttatgatctttctgatactgtaattcttagcaacgccgatggcggtgctggatatgccaaaacagacttcgatgacattgtagggctatgcaagcgtcatgagcatttcttggatgtctttcacctaaataagaaaatcaaagaaaggctatattttgcgcctgacctgcaaggcaagctgatttctgctttggaatacaaatacagctatgacaaagttaaaactatcctaaccactgcagaaagccgactaattgatgaattgaataccgagctcaatcatgattatctggggcgcctaaggaattatattgatcgtcattgggacgatattaagccgtttaagaaatgaaaactgactgtgactaaagccattggctgctgcgagagcaaccaccgcaagtatacctaccgtgttaaggggcaaggcaagaaatggtcaaaatctggagcagaaggcatgcttaggatcttaagctgcatcaagaatcgagagctggaattttggcttagcagcgagtttgaagattcagaaataactgtattgactgaacaggaattaaaagcagcggcccgtgacagcttaaagaagcgtcatgaagttcatttaggcatccagcatggcgcattaaccgcacaggtagctggcaatagttatttaagcaagctaagcagaaatttaagtcatataaatatttaagaaattaaggttagactaatggtttaaaggctaccgcaaaaacattgacacttacccaaatgggatcaacagtgatgaataatgccaaaagtggtattttagaacaacaatatcttatgccaatttcttctagaagattatttttaaataaaagtattgcaaatattgttgtggcattcgtccaagcaattttaattctgatagcagtaatggcaatttctgatcactggattagttttccagtaataatgattgttccatttatattagctttactaactacagtgggattaggctatttaattgttagcttagttttacgttttaaaagaattggcagtaccttagtgatttttcaatatatttacttaggtatactactagttaattttgaaaactactccaatcttacaaaatgcttatcttgtttattgccaatttgtccaatggttagttggatgagattagcagttaacaatcgaccatacaatttagcgttttatttaagcgaatctatctttaataccgtattatggttgattattggattgctagtatttaatttagctgataaatatgtaaagaaaaatgggactttatctttttattgattttagttgctaataaattcattcatccctgaaaagtgattcttgcccacaaaaatttcaaggaataacttctacttatgcattgttctgtggtaggaacgctgtaaagtttgtgtctgcagcttgggtaaataataacgatcttcatgtttaaaaatagggcaaaaattgctctatttttagctcccattagaattttccgtggcataattgacgtataaatttgaaagggagatataaaaaatgaagaaaaaagttttatcatttattgccgcttttttagttgttttaggtttggctagcgttcatgcaaacacagcaaatgctgctagttagggtgctaccaaacttttcaccacacctaagaatacgcgtggtgtttggtaacacaaagaagctggtaaagttattagaactaaaattactgcacatactattaacggcctcaaggtttataaggtattaaagggtaaagaagcagataagtgggataaaaagttaactgctgccgatgaaaaggctaactacaaattagctgacaaagtttctagctcacaatttgaagcttatacctttaaattccacggtattacggatttcaacgcaaacggctggcttgctggtagcggcgacggctactactatgctcctatgaagaagaccgttaagggtaagaaagttaatgctttgcgtgtcggcggcggtgctggcaactactttatcagctacgcttacaaggataagaaattagcgtaaattgcaataataaattgaacacttaagctgcttgatagattttgtctaattctctttcaaagatttcatctggtgtgtgatatgccaatagttttcttggcaatgaattacaccaggtttcaatatcaatgatttcttgaagagaatagttattgatgtagtcacctttaggaatgaatctgcgaataaggccattgtgtctttcaacagtgcctttatcacaagaagtatacggatgagcgtaatagactaaagtgttagatactttctctaagttggatagatccgcaaactctgagccattgtcagttgtaatcgttttaaaaatttcattccagtgtttctatattgactgtgcaaggattgaaaagctgacattacactgttagccgttttatccggaatacgtatgatcaagaactctcgactcattcgttcagacaaagttagcagcacttgatcgtctctagtcttatgtcctaagactaggtcacattcccagtggccaaactcttttcggtcttaaatcactttagggcgctcttcaatgcttcgacctagtttctttttgtttttacggacacgatgaattttaatgttacgctttaatttttcgggtaaatcagagtttctgatagccaacaagccttggtctacatagttatacaacgttctagtacagactgtttattcgctgctaaattttcctatagccagacagcgattggcgcatacatcaagcgaccaattattttcaaagaagtgcttaatgacatacttaataaagtcattcttctttaagaaatctgacttgcgaccgcagcggtgacgatccaagtggtaaacttcattaccatgttttgctttatatcgcttttgcttgccattataaagcaaaactgtgccacgcttaacttcataactgatcgtagaaggagaacagccaatttcacgggcaatagctctaagagagaagccatccttgatacgagtttaaataataactcgctcttctagtgataaatactttcccttttcgtgcttaggcatgatagaatgtaaagagtccatttgtgacctcgtttctgaatgttttgtggtaattacattttatcaaacaggtccaaatggactttttatttttctaaagtgttcaatttgattttacaatcggcgaaatagaaaatatgttaattcataagaaaattatttttcaaataaaggcactttcttttgtgatttaacttcaaaaagacctttatcagagatttttagactaggagaaacaagtaaagacaaagtagagaaagacataatttcgtttgtatttttatagcccaattctacgagatttttacgtatattaccaatttgttctcctaaaatcttcattggttgattgcttacaactccaccaattggaagaggagcattggctgcaatcttttcacctctggcgactatataaccaccttgctgattaattaattgatgttgaatgtcaatcatgccatctatatttgttcccattaccatcaaattatggtgatcgtgagcccaggttgcccctacagcaccatcaccaataatgccacgatcaactaggcctaagctaaatttaccatcatttaaaccatatctttcttggacaataattaaagctaaatttgcactttgccaatcaacgatatgattatgtacagctagccttttttgaatatgatttgtaaaagtaccgacaggatttatttgaatgacatttgctgtaactgagccattatcaacaagatttgttttaagtaataggtcttgtttagttaatttaggagctttcacactagtagttagactattaggtgaaaaatcatcttgagaagtatttttgatagtctcttttgcggatattccatttttatagacatcagctattgagagttcttctaaattatccagaatggagaaatcagcaactcttcctggtgcaattgcaccacgatcccataatcccatatgtcttgcaggaatataggtagaaatataaatggcgtcttctggcttcatccccatattgattgcttttttaactaataaatttaagtgaccttttaacaaagtatcaggcattgaatcatcagtaactaaggctacatgttcaaaatatttattatcaataatagtattgatgacatctggatgcatggattttaattgaacttcaacaaacatcccgtttcttatcttttcattgactaaatctctagtttgttgagtatgatcagtagtaacaccggcatataaaattttagctaaatcttcaccatgataagcaggggtatggccttcaattggcatagtaggtttagttttatgacaagtattaattatgtccttaattagagtgtccttgtcagaagtcatatctttaaagttcatgacttcacctaagcaaataaagcgtggatctttaagtaattcttttacttcaggcacaccaattttaccgccagttgtttccatttgaggattggttgaaggaacagaagaagggatgccgaagaaaatatcaattggcgaatcttcattaatgaaatcttttaatccattaataccggcgacattagtaacctcatgatcatcagcaataatagtagtcgtgccatattttagaattgtttcacccattattttaggtgtagtcattgagctatcaatatgcatatgggcatctacaaaaccagggattaaatatttaccttgtagatcgatgactttttttgcttttaaattaggtaattctttattaatccaatagaatttgccatttttaatacttacttgaacatcttgaaattttcgtaaatatacattaaaaacatgagcatttttgataattaagtctacctcagtcatttaaaatcctccataaaagataaggagctgaatctacaattcagctccttatagggaataaacatcaattatttattcataatcttattccatcttgaaatccagttagacatatgtgaatttacaaagaagaaattaatagtttttgctcttttagcaactgagccataagttttgtttgctgcttctgcaggtgttaatttaacttgagtgtttacaggagcgttgttcaaagatttaagacctgctactttcttttgaattttttcgcttaatctaaagttgatgtatttgtatgcagctgctgaatttttactattctttaaaatagagacattatcgtagttagcatatgtaccagacttaggaacgatgtattttaagtttggattagttgcttgaagcataccaacagcataatcaccaactacagcagcttcaatttcaccagatttaaacatgttacttaaatctgaactttgggtgtaagttttgacaacattaggttttaattctttcattgccttaaatgctgcatttccgttgtctttagttacactagtaccagcatagtcaccagcaatatataacattgcggggccaaaagtagttgtcatatcaggtacagcaatcttatttttaagtttagatgaccataagtccttccaagaattaatattaactttctttggattatagataatacccaaactgtttacggtataaggaactgtattagtttctttagctagtttttgttctgattttgataaatatttgaaattggaaatcttagagaagtctaacttcttaaataacttctttttatcgccagtaacagcattgttttgagcaagttcaattacatcaacacctgtattagggttatgttcaatttgagtaagtcttgttgcactatcaccaaattgagtttttactttaactgatgattgtttagcaaaaggatttaaaacatcgttccgcatttgtttggtagataaaccaaaggttgaaacagttaaatttcctccgttagaagatgattgtgatgaacatgcagttgtaccaaatgcaactgaaccaactaataaaaaacttgcagctaataaaccaacttttttaaaattcatttttattcctttctttacaattggttatctagacaacggatgaagatgcttggagggcaaataaagctgaactttatctcctgagctacgcatcgatttcctagactcttcaacagtgaagtctccgagactagtacttaccttatatttaaagctctgacctaaatactcaagactagtgattgttccatcaatcaaattattagacggattttcttctgaattaatcaaaatattttcgggtctaatagttaataccttagcttgaatattattttcatcagttaagaaaacaagatctttacttttaatttggcgatcattaataatttcatcaacattgatgaaattatcataaccgatgaatctagcaacatattctgaactagggtggtgaaagatgttttcaggagtatcatattgatcaattttgccatctttcatgattaatactttatcggaaatagcgaagcattctctttgatcatgagtaacaaaaagaactgtcatttttagcttttgctgcaattctctaatttcgctacgcattttaattcttaattttgcgtctaaattactcaagggttcatccattagtaataattgtggattgactaccaatgcacgtgctaaagaaactctttgttgttgaccaccagataattctttaggatagcgagaagctaatttagacaagccggttatttttaaaatttgatcgactcttttttgaatgtcacttttagacatctttttcatttttaatccgaaagctacattattaaagacggtcatatgtgggaataaagcgtaactttggaaaaccattccaaagtttcttttgtaaactggtacttttccaacatcttcaccatcaactaaaacttgtccgtctgttgctggaattaaacctgctatgattcttaaagtggttgttttaccgcaacctgagggtcctagaatagatactaaatcaccgttttttacggaaaacgaaatatcttttaatactttggttttaccgttatatgattttgctaaatcttttacttctaaaattgccaatttaattgttcctatcagtaagtttatttagaccaactagtttttcagttaaaagcataattaatgctgtaaaaatcattagaactacagaaatagcagaaacagttggatcatagttgttttgtaaatagttcaaaattgctggtggcagcattgtaattgatggtccattcatgaacaatgaaattggaatattattaaatgaattaataaaacacatcataaaggctgctacaatacttgctttaatgttaggtaaaacgattaagaagaatcctttctgaggtgaacatccacaaacccaagctgcttcttcaatatttttatccattagtaacatacttgctgtaactagtcttattacataaggtaggcataataaaaagtgaccaataattagactaggcataacaggtagtctaagagtaacgacagcagcttgatataaggcaaagccaattacaatttctggaattagagtagggcttaagaagaaagagtgaaaccaagacttatgaacgatgttgaatcttgttaaagcataaactgcagggataccaattattaatgccgaaagactagcaataatggcaacgaacaaacttgattcaaatccactgataaaatctggttgctgaaaaatattggcataccaggataaagtaaaacctttaattggtagagaaattgaatcctgattattaaatgaagtaataattactaaaagtagaggaaacatcaataatatcaggataataatagaaataattgctaaagttttatttttacgattaagcattaatattaggtctcctatccaaagaaactgtcaaatcttttgtgtaaatagatctttctcgtaaattgattttttaattatttatttaatcaaagtaggattctaaggtgtcctgaacctgaccaaagcctttatgaattcgattgaaataacggtcattgtagctcattgcctgaatgccaataaaagcatcaagcgactgttcagttggaaactatgccttaggcttagctttgcgcttgatcacattgttaaatgattcaatcatgttagtcgaataaattgaagctctgatctgcttgggatagttataaaagaccagcagatctggttctatgtctttcaagcttctgataacatggctgtaaaccttgccccatttggtatagaagtcatgcaggacagctgtggcttcttctttgtttgtctgttgatgcacctgtttgaattcgttcatgatcttttcacgatcgtcgacgcgtactttagcgcagatattgcgcatgacatgaaccaaacagcgttgaaaatgagctttaggataagtcctggccaaggctgttttcatgccaacaacaccatcagaaagaaaaagctcaacttgctttaagcctcgggatttcatgttttgaagcatatctgtccagacttcaatgttctcgctaggtgcaatgcagtagtcaatgacctccttgtgcccattaggcttgatgccaatggcaatatagactgcttcacgctcaaatgtttctcggcgcaaaggaaggtatgtcgcatccaaatagacgcagaaaaacttgtcgcttagcttgcgtttgtggtaagcctcaacctttggaatcatctgcttggaaatatttgatacctgagctggactgtaatggctgccatacatcttttcaattagatcggctatttccctggtggtcacgcccttggagtaaagcttgataatcatgctttccaagatatccgagtgctgcttgtagtcaggcagcgtgtgctgatgaaattgaccgttgcgatcccgaggcacttgcacttcaattgggccaaattgcgtatcaactttgcggaaataagcaccatttctagagttgccagtattccagccatttctggcatagggatcatagcccagaaaggcggtcaattcagcttctaacaagttattaacagcctgttgtagctctttgcgcaataaatcatttattttgtctggattgaatagagcttgagcaaaatctttggtaaaatcattcatgaaggagttcttctttctgtatgtgtttttttgttcaaaccaatcatacgagaaaggaactcctttttctaatatttaaagaaataaatttaaggaatcattcatccttacacaaactattttacagtctctatccaaagcgcgacttgcttttctcattaatatcattgataaagcagagataataatcagaactattgcaataacacttgcatttttccagttacctaatgtcatggcttgttggtaaatcaaggtagacattactaaatttttattacctcccaaaatttgtggggtagtatatgctgtcatcgcacctgcaaagaccaaaatgcatcctgttaaaatccctgagactaattgtggtattacaatttttatcaaattaacccatggattggcgcctaatacagcagcagcttcttctgcttcaatgtttagctcagaaatactaccaactaatgaaataatcataatcgggagaaataaataagctgaaccgatgataattgccgtatcagtataaagaatgtttaatggagaattaattaaatgaatagacatcagaaatttatttagaataccgttacgacctaaaataatgatccatgcaaagtttctgacaactgcattcgttaacattggaaaaagaatgataattgttaaaattgatcttactttgctcttttgacgagcaatccaaagtgaaattggaattccaagaattaaaacaatgatcatagtgagtaaagcaattttaaatgttctaccaattacatgaagattgtacgtgttttttagaaattcagtgtataggtgcaaaaatcctttagaatcttgaaatgttggtatagcaatctgaattaatggaaagaatgcaaaaatcaagacactaataaatgccggaaatagcagccaaaaactggattttattttcatattgttcgtattcctccttatcttgtcttagaataatttaaatgtaaaaataagtcaatacaaaatatgaattaaaataataacatttgtgttaattgtatgcgtattgtattatttatgaatataaatagatttatttataaatttatcttcttgaaaatacgaacattaccaaaaaggaagtggagttcttaatgaaaaagccagttattattagtacagatccaggaatagatgacgcagttgcattagcaatatgtcttttttcgcctgcaattgaagttaaaagtattattgcaactaatggcaatgttaatgcgcaacaagctttaataaatatattgaaattggagaaatttttcggtaaaagtattcctgtagtaaaaggggtagagcgttcattagtcaaacaatctattcgagctaaagaaatacatggtaaatcaggaatggacggatatgattttccaaatcctagttttgaattggtggatcatggcatatcaccggttgccatacataaaatagttgcagcttcttctgaaaaagtaactcttattggaattgcaccacttactgattacgctctatatgttcgtttatacccagatgatataaaaaatattaaggaactaattattatgggcggagcaatgggtagaggtaattatggtatctattctgaattcaatattgcatctgatcctgaagctgcaaaaatcatttttgaaagtggattaaaaattagagtagcgcctttagaattaggtgcacaagctaaaattatgcctgaagtaagtaatcaaatacgacagttaggaaaagctggtgatatgttttacgacttatttaagaaatttcgaggtggcagttttcaaactggccttaaaatttatgatgcacttgcagcaggcgtacttttaaatccgcaaatgtttaaatttaaaaatacacatgtagaaattgatgttcaaaccggttatacatatggtgcttcattgatggattttaaaaataagctagatcttccaaataatgctgaaatagcagtgtctgtagatccagaaattttttctaaatggtttgtagaagctttatcaaaaacaagataaaaaagtcaattaattgtcaacaattaattgacggataatggttaagcgagtatactactactagttgagaacaagaagaagcacccgcttctcgcctaagttaagtaaacctctaggctgattgataatttctgttgattaaaggcgggtatgattcttataacccgcctttttcttgtcctcaaattaacacggaggtgaacagttataccaagaagtttaatcttaaacgacagaattcgcgctcgcgaagttcgtttaattgatgaagatggtcagcaagttggtgtgatgagtaaaagtgatgccttacgtcgtgcaagcgatgcaggtcttgacttagctctgatttctccaaatgctaagccacctgtagcacgtatcatggattacgggaagtaccgctttgaacaacaaaagaagcttaaggaagcccgtaagaattccaagacagtcagtgtcaaagaaattcgtttgagtccaactattgaaggtaacgacttcgaaactaaacttaagcacgttcgtaagttcatttctaaagaaggagctaaggttcgcgtctcaattcgttttagaggtcgtgccatcactcacaaggaattaggtcaacaagtacttgaaaaaatggccgaagtaacctcagacattgctaatgtaattagtaagcctaagatggaaggtcgttcaatgttcttgatgcttgcacctaagagtgataaggacaaaaagaaaaagtagttaattggaggaaatagaaatatgccaaagatgaaaacacaccgcgcttctgctaagcgttttaagagaactgcaaatggtggtttaaagcgtcaccacgcatttactggtcaccgtttccacggtaagacaaagaagcaacgtcgtcacttgagaaaagctgctatggtttcaaagagtgatatgaagcgtatcaagcaaatggttgctcaaatgcactaatacttgttcttaattaagacagactatagtaggaggaattttaaatgccaagagttaaaggtggaacagtaacacgtcaacgtcgtaagaagatcatgaagcttgccaagggttaccgtggcgcaaagcacatgcaatttaaggctgcaagcactcaattattcgtttcatacaagtacgcattccgcgaccgtagaagacgtaagagtgaattcagaaagttatggattgctcgtattaacgcagctgcaagacaaaacgacatctcatattctaagttaatgcacggcttgaagttggctggtgttgacatgaaccgtaagatgttagctgatattgcttacaacgactcaaagacttttgcacaattagcagaaactgctaagaaagctttgaactaataacaaaagaaataagctagggaaattttcctagcttatttttttatctatttttgaattaatgctcgtaatctaattttttcatctggcgtagtaaaggccgcgtcaaccgcgttgagataaagagtggtttcttcttcaggagtcaaggcggtcttttcttcaagcagttggtattcatgcggtaaattggtattggaaacgatcatatcatcagaatttagcgtgactttcattcccatgtgcaataatttttttattgggtaagaatcaatctgatcaaaagctttggtgttcatatttgaagtggcgcaacattccaatatgatttggtgatcaatcagatattgggtaagtgctggatcttcagtgcagcgaatgccatggccgatccgtttcgcgccaatttttaatgcttgacggattgaatcaggtcccgcagcctcaccagcatggatggtataaggaaggtgtaattcttgggcacgattgaaaaaatgctggtagttaatgtgagggatcgggccttccgcaccagctaggtcaaggccaacaacgccatgacctaaaaattctttcgctagctcaaccgtttccatgttttctttttcattgtgggcgaagcgcatcaaacagagaattaaaccagcgtgtaattcaggctgatctttgtctgctttttgtttttgataaaacttcgtaataccgctgactgctgcagcgattacttgtctttgcgttaaaccatttttagtatgtaattgcggtgcaaagcggatctcggcgtagactagaccttgttgttttaattcgcaaagaagatcaaacacaatcatctccagatcatgctttgtcttcattaactggttaggtaagtcaaacttttccaaaaattgttccaagctagcgcaagaattatcaactgacaattcttgccgcaatttttgatcagttaactgtggcatgtgatgttcctgcattaacttcttaacagtagcaactgggacagaaccgtcgaggtgaaggtgtaaatcgatgaattttctcatggtgatcctttctgttgattgatgattttgcttaaattgtttagtattgtaacactttttcatcagaaaaaaacaaaaatttctaaagcaaacccatttttgatatgatataaggtgataaaaaatggaggaaattaacagttaaaagatagacaagatacaaagatctgttcagaaatataaaacatagaagcaggtcaaaaactaaaaatttaatattttgttcgcttgtatttatttcactctttgctaaatttatgtttgtattggaggtgaaacaaatgatcaaggctcaagtagtcgaattaaaacctaacaagaccatgcaacaagagctggataagctttgtgattatcgcagatattgctggaatcaagctttagccacttggcaagacatgtatgaagcacgaaccttagataaggataataatcccagtccaaatgagcgcagaatacgtgatgagctagtcgataataaggcagactggcagtttgctctgtctgctagatgcttgcaattagcagtcaaagatttggctaatgcttggaagaatttctttgataaggcacagcctgattgggggaaaccacatttcaaatcaaagaaggccccgcgacaaggctttaagactgaccgggctaaagtggttaatggtaagctacgcttagacaagcccagaggcattaaaacctggttcgatattccaacatatgaagctttaaaaatgaagcaaattaaagttgctagtgtctttagagaaagaggacattattatgccgctctttcttatgaagaagaaactttggtaaagcctagaacaggtagaaagacagctgttgatgttaatgtgggacatttcaactacactgggggcaaaatcaatgttttgccatcaagattgcaaaaactatacaagcgcattaagcattatcagagaatgctggctaagaaaagacgggctaatggcaagttagctggccaaagcaataattacgtgcaagtgagaaccaaactgcaacgtgattatcgtaaagtagccaacattcaaaacgatcttttgcaaaaattcactacaaaattggttaataattatgatcaaatagtgattgaagacctagccgttaaacaaatgatgatgacgcacgtcgcttcaaaaggcatgcagagatcattattcagtaagtttagacagatattgacttataaatgtgagtggtatggcaaagaattaatcttggctgataaaacatatccatcaacccaaagatgtgctaattgtggttatgttaaaaaaggtgatgaaaaaatcactttgcaaggcaaccaaaaacatcacactaagcacaatgagtatatttgttatgaatgcggttatactaatgatcgtgatgataatgcagtgttaaatcttttagctttagcaaaataatgaaaacggggctggctaagcccttaagctgcaagagttagtcaatgcgattactcctagattggaatattggaatactaatgatgacagcagtaaataaagcgaagaaaggaaggactatatttctttctgatatgtaaaaaaatatacattcttctacatatttctatgttttatatagcagtgttgatatgctttttagaccaaaatatacaattgatacgatttacaatctggacccccagaagttgaatgaaatggacattaaggcggttttttcagacctagataatacattgctcgcctggaataaatttgaaactgccaaagaaatggataattttaatcaaaagttagccaaggcgggaatcactctcgtggtcatttctaacaataatgctcaaagagtgggcaaggtacttgatccttaccatatcgaatttgtcgctaagtcacgtaagccattgccatttgcgatcaccaagaagcgcgaagcaatgcatttgcaaaaagatcaggttatgatggttggcgaccaactaatcactgacatgcaagcagggaatttggccggcgtgaagactgttctagttaagccattagttgaaactgataagtggaatacgagaatcaatcgtttctttgaaaaaattatctttttcttcctgggtttatcacatcgagtaacatttaagaaggagctatcaaatggatgaggatattatttgtatcggctgcggtgccaagctgcaatccgatgatcctgaaaaagcaggttatctgccaaaaagtgcactagataaggcaaagcaagaagaaaatgcggatgtttattgtcaacgttgcttcagattgcgccattataacgaaatcatgccagttgatttgaacaacgatgattttttagctttgcttaactctttaggacaaaagaaagctttaattgttaatgtagttgacttatttgatttttcaaattctttgctatcatcattgaagcgttttgttggaaataatgattttattttagttggtaataaatttgatctatttcctaaaaactctaagcaaagtaagattaaggattggatgagacaagaagctaaccgaatggggctttatcctaaggaaatcttcttggtttcagctaaaaagaagttgaacttggaagatttgatcgcttatattaataagcaatcgcaagacaaagatgtctattttgtagggacaactaatgttggtaagtcaactttaatcaatgccattattgacatgatgggtgatattcaagacctgatcaccgcttcacgctttcctggaactactttagacaaaattgaaattcctctagaaaatggtcactttttgattgatacgcccgggatcatgaccgagaatcaattggctacgcacttaaatgctaaggatttggagctggtctcacctaagaagcctttaaagccagctacttaccaattattgcctggtaatactttattcttagctggtttgggacggattgattatctcaagggcgaatcgactagctttactgtttacgttgctcgtggaatgtatattcaccgtactaagacagctaatgcggatgacttttataaaaagcataaaggtgaattgttatccccaccagctgcagatgatgaaatggcaccactaaagggtcaagaatttagaacggaatataagagtgaccttttatttggtggaattggttttgtgactgtacccaagggatgcgttgttaagacttacacaccagatgggattggtttaggtattcgtcgtgcattgatttagaggtttgcatatggttaatccaaaatgtattgaaaaaatgccaactgctaaagttgaagcagaattggaacaagaacaaggtaaaggtcgtcagattgggattatgggtggtacctttaatccggtgcatattgcgcacttggtagcggcagagcaagcaatgactaagttgaagctggatgaggtctggtttattccggataatattccaccgcataaaaatgctccgctgacttctgctaaagatcgggcaacgatgcttgatttagctacgcgcgataatcctaactttagggtaaaactattggaattgttccgaggcggcgtttcttatactgtggatactatgcgttatctcaaggaaaaagcacctcagaatgactattatttgattatgggcagtgatcaggttaacagtttccatacttggaaggaagctccgaccctggctaaactagtaacattggtcggaattcgtcgtccaggttatccacaagatccgcaatatcccatgatttgggttgacgcaccagatattcgcctaagttcgactgctattcgtcgcagtgtcgcaactggcacttcaattcgttacttggtaccagaagccgtcagagaatatattgaagaaaaggggctttaccttgacgaaactaatttttaaaaatacttattcaccattctctagtgaacaaattgttgctaaagaaaaggcaaacatgaagaaaaaacgttttgaacattgtgttcgtgttagtgaaactgcacgtaagttggctaagttaaatggatatgatgaagaaaaagcagccttagctggctttgttcatgattatgccaagcaggtaccggtagaagagtatcgtaaggtaattaaggaacaggattttgatccagatttgcttaattggaatcgggccatctggcatggcattgtggggattttctttattgaacgtgatttaaaaattagggatcctgagattttaactgccgtacgtcgtcatacgactggtgatactaagatgactacattagataaaattatctttgtagctgattttattgaacccggacgagattttccaggagttgaagaagcgcgcaaagttgcttatgctagtcttgatgaaggggtaggctatgaattgcagcacaccttagagtttttaattgaaaataaaaataaagtatatcctcgtactttagaagcatacaatgtatggggaattaagtaataaaaaggagaaaaatattgactagtcaagaaattttagattttactacccaagcaattagtgaccgtcatggtgaagatactgaagcttacgatatgcgtggaatcagtattttagctgattactatgttattaccagtgcaggctctaatcgtcaattacatgcgatcgttaactcaattgttgatgcggctcacgaaaacaactacactgactaccgtattgaaggtaccagagattctaactggcttttgctcgatttaggtgatgttgtagtcaacgtctttactaaggaagcacgtgaattttataacttggaaaagctatgggctaacggtaagcaagttgaattgaaggaagattaagcaatgagtgttgttgggattattgcggaatttaatcctttccatagtggacatgagttcttgctaaatcaagcacgcttggttgctggtaatgatccaattgtggtgctcatgtctggtaactacgtgcaacgtggtgagatggcgattatgagcaagtgggagcgggctaaggtggctttgcaatctggtgccgatttggtatttgaaacaccattttcaacggcagtagaaccagctgatctttttgctctcggaaacattgaacaacttgctaaattaggcgtaactgatttagtctttggtgtagaagatgctaacctgaattttgcttatttgggtaaaagaattgcggaaattccccagaatcacatggattttagagattatagccaaacttattcaacacaatacaaccaaatggtagcgcatgaagtaggctatgaagttaatcagccaaatgctattttggggttagcgtattcagtagctaatcataatttaggttcaccattaaatctgcatccggtcaaccgaattggagcaggacatgatgaccttttacaaagagaaaaagttgtccaaagtgctagtgcgattcgaaatttattattgcatggtgaagatacaaaaaatttaaagtattggatgcctaaagcagaagcaatggtgttagctgagcagaaaatttatcctaattggaatttgctatatccatttttgaagtatcaaattgaatcatcttcagttgaagaattgcgtcatatttatcaaatgagcgaagggcttgaatataagatgaaacaagagattcatttagcccgcgattttacagaatttttgcggcatatcaagtccaagcgttatacttattcccgtttgcgccgtttgagcttatatactttgcttaatgtcactcaggatgatatattggctagctttaatcatgagtctttgatgctcttaggctttagtaaggtaggtcgcaaatatttaaagcaacagcgcaaggaatttcagacagaaatcgtctctaaagttgataaaagaagtgctaagaacggctctttagctttacaagttagggtagaccgtttatttgaacaaataatgggcgttgatcaaaactttggtcgacggccaatcgaggtgtaaaaatgttagaacttagtttttctaggattcaaaattccaaggaaccattaactcacattgaacgtgatttggaaatgcgtccagaattttttaagcgtagtaaagatctactaattgatgcgaaaaatgtaaaagtgagcggtgacttgttctatcaagaaccatttgtgactggcagttttcatgtggccgctgatctggttgtgccatcaagcagaagccttaagccggtaaactatcatgaagattttacttttactgaaaactaccttgatcgtaagccaaccaaggaagaattggaagaaaacgatactattgtacaagttgagaatgaccaaattgacttgcaaacagcggtagaagataatattttactccatattccaactactattttgactcctgaagaaaaagaaaagaatattttcccagagggtcaaggttgggaagttgtttctgaaacctcttttgaagaaggcaagaagaaccaagttaacccagcttttgctaaattgaaggtcttgcttgatgggcaagataatgataaggacaataaaaataagtaataaatgtaattgaaaaatatggtggacaatcaaagaaaatttttactttgattgttttttaatcttgtgttagaagcacttttaaagtatcctttaattataaaagcattttttaattaatttattagtattagaaaaccaaattgatctacgaggaaatgaattaacatggcaaaaattctaattattgaagatgaaaagaacttatctcgctttgtcgagcttgaattgcaacatgaaaattacgagactgttgttgagaataatggtcgtaagggattagaagatgcattgagtcaagactttgatgctatcttgcttgacttgatgttacctgatttaaatgggttggaaattgcacgtcgtgttcgtcaagttaagactacgccaattatcatgatgactgcacgtgattcagtgatcgaccgtgtttctggtttggatcatggcgctgacgattatattgttaagccttttgcaattgaagaacttttagctcgtcttcgcgcagtgttacgtcgcgttaaaatcgaaaaggacgcatcaaaggttactgttgctaagcaaaagattgtaaaatttaaagatttgacaattgaaactgctaaccgaattgtgcaccgtggtgatggcaaggcaatcgatttaactaaacgcgaatacaacttattaatgaccttgattgaaaataagaacaacgtagttagtcgtgatcaattattaaacaagatctggggtccagaatctaatatcgaaactaacgtagttgaagtttatgtacgttatttacgtaataagattgacgctccaggtcaaccatcttacattaagacggttcgtggtaccggttatatggtaagagatgaagatgatgatcaagaataaagacgaggaaaaagaggccaagcactcatccctaattgtgcgatgggttagtatcgttgcattaacgattacggtctcttttgtcatattttcagttgttgcctatcaaattgttagtcatcaatcgatggaacagcaacaagagacatctaataatgtagttaccacgatggaccggacattaagttctattcaagatgagctagagatctcaaatgtaattcctgctctgtcaccgtctaccaggcgtattttgaggggcggtcctgctattagcaaaaaagatacagagaataaagcatttagtgatagcctgatttcatcgatttcgaatccagatattaatgtagcagtttacaacaaacatgatgaaattgtttttactaatggtaattctgcacctaagctaaaagaatttgccggcaaccaacttgaagaagtagtaaaccgaaaaaaaggcaaaatgcttttaacctaccagaaaatctattctgaggtaaatggcaaattaactggctatgtagtggtttctaatagtatgacttattacaatagcttgatgagtaatttgcttcattggatggtaattatttcactgattgcaataattatcttcattgcaatttcttatattttggttgttaatgtagttcggccaattaagacgatgtctaaggtggctaaggaagttaatgctgatcctaatagtgaggctagaattaaggaactacatcgagatgatgagttagaagaattagctacttcgattaatcaaatgctagaccggatgcaaggttacattgagcaacaaaagcaatttgttggtgatgtctcacatgaattaaggacaccagtggcagtaattgaagggcatttgaacctgcttgaaagatggggcaaggatgatccgcagattttggatgaatcaattaaggcttcgttgcaagaagctgatcggatgaaacatttaattcaggaaatgcttgatttaactcgagccgagcaaatcgatgttcaatatccgtatgaagtaagtgatgttaatgaaatcatccgcagagtggtcgctgatatggcaatggttcatcctgacttcaagattcagctggatgaggatgatttacctgatgatacagagattcaaatgtatcacggtcatttggaacagttgctagtaattttgatcgataatgggattaaatattcgactgatcgcaagcagattaatgtttcagctggtgtaactaagaagaatgttaatattattgtgcaagactttggtgaggggatttctgaagaagatcaaaagaaaatcttcaatcgcttctatcgtgtggataaggctagaacccgtgaaaaaggtggcaatggtttaggtctatcgattgcacaaaaattagttgctagttataacggaacaattagtgttgaatctgttgagggtcagggcagccagtttaaattgaagttccctcggttgactaagaaaaaagccgctaagttaagaaaattaaatgagaagaaacaaatgcctaagagcaatcttgaggcataaacaaaatcctattaaatcaaggtttgggtaccaagatttaataggactttttttctctagaggcttaggtattagaaaataagaaataaaatgcttcgaaaataattataattgttcccggatttaaaattgaagtgcaacactaagtgttaaacaaaaaggccatgaagacctaaacttgaagtgacgaaaaatcaagaaaggaagatcttcatgaccaattcaaattctagcatttctaagcactatcatcaattaaccagcgtacaacgtggacaaattcaagcaatgctggattccggcataacttcccgtactgttatcgctcaagaagttggctgccataagtcgacaatcagtcgcgaaatcaaacgcggaagcgtcctgcaaagagacagcagctatttattgtatgagcactattacgctgatactgcacagatttattatgagaagcgtcgcaaaaactgctatcagcgcaatccattgaagcattatgctgtctttttgagaatgctctccagacgctttaaagctaaatttgatgccaccagcatcgatgagttcgttggtgaattccaaaggactatgccaggctacccttgtcccagcacaccaaccgtctatcgctatattgatcagggcttgctggacataagcaatattgatctgcctatgaagctcaaaagacgcaggaacaagcgtcatcacagccatggcggtcacgctttgcacaagaagcatcttggcaattccattgaacagcgtcctaaggaggttgaagacagaaaagctccgctgcactgggaaggagatctggttaaaggcgtcagacgcaagaatcagcctgctttaatgactttgactgaaagaaccacacgctttgaagtagttatcaagattcctgactatcgggcaagcacatgccaaaggctgcttcaaaaggagattgacagacatcctgcctggtttaaatcaatcacgtttgacaatggctctgagtttgcggatatgaccaagatcaagggctgccagatttactttgctcacccatattctccatgggaaaggggcaccaatgagaactgcaatggtcttttgcgtcaattcttccctaagggcaagagcatgaaagacaagtcaaaagcttatgttcaacaggcaactgatgccattaaccacaaatatcgccgaatcctccaatatcacacagcagaggaactcttcaagcaatatatctcttcataacctaactgttgcacttaatttgacaattcaggaattataattgttattaatttaagcgatttaattagctaaaaatatttaaacttaagtcatgtggtaataagtcaaatgaaaggcgatgatatttgttctttttgatcataaatttgagtatatgaaactaagccttggtaaaggttgatttttttaatgttaaacttttgtttacttttaaatttagaccaatttttgaaattaagacctcggtgtcctgtacagtttgtcatctttgagcaatttaaagataactcgtactaattttcttgcagttaatgtgcaagcacgtttatgcggcgagtagacagcttcatcatacttcttttggtaatattttttgaaaacaggatcatgtaatcttgctagattggcagcttcaatcaagtaatatcttagatatctgtttccagtcctggccattggagtatgttcgttgctgtgatctcccgattgatattgattccaggttaggccggcatacttagccagctgttcttctttatcaaagcgatcgatacttccgatctcagcgataataccagctgtataggttttgccaataccgggaattgattccagaattttgctttctggtaatgcatcaacgatacgatcaattgctttttctagatctttaatagattcattaaagctttgaatcatgttgtaatgaacagaaagcactgcatcaattgaatcagtcattactttgcctaagcgatatgaacctctaacagctttcttaattgctttagccaaggtatctggatcggaaaagcgtcctctgcctttaacctgtaagtaagaaattaagtcttcggtaggcatatccgcgatctcatccagagttttactatcggttacaatagacatcattgtagcaccgaaaagaggagtattaatcttatctttatcgacagtgattagtttattaacccgataatataaagcttcaatgaagtgctgtttggtacgagtcagttcttgaactaattcatatctggtacgcgttaaacgctctaaagcaagatagttgtcttgtctggcaatgcttactcgataatgtccaaagcttagatacaaagcaatgtaataagcatcgagaggatcagttttactttcttcaaagactttatgaaacctgctggtttctttggggttaattacatcagtctctacattgagcttttgtaaatcttcgtcattttggaaaaagtaagcaggatgaaaactgtaaatagatgtagcttccatgccaataatgatttgatcatagtgtttattttgagctagatctaaaatttgttttttcagttcactagcaccataaagatcattgacaaagctatcgttaattaagcgtttgttttgatcttctgaatcaagtgcaacgacctgtaaatctttagaactaacatcaataccgacaaataatttcattggaaatggcctcctttctttcaaatttctgatcatagattttgatcttcacatgttaacccctaattacagttcttaagttcaatctcgccagtataagtattcactggttgcttctttgaaagctgcacctaatcccaattgctcaaggactagcaaaaagaagcaatcaatacagcatgtgagttagagcataaaggaactgtctgggtggcagacttataaagcagacaaaactgcaggaggtgataacctagaccagttgaccaaagccaatgacaattagaggctaacatgtgaagatcaaaaagcaaatactaatttgattaattatcacaatatgactaattacaatttatataatacgagggatgtgacataatgaaagaacgcattttttcaaggaaattctggcagaaagtttttaactatcaattgattatctggtttctcttgatgattagttatactttttctcagcggaataatcatttttattttataggggatttgttcaatctagcttttagtacggcgatcatgggattgaacttttacgtgcaatttaaaaaggattccagcaagactaatactcaaattgttcgctggctgaccatagtaatttttcctttcaatttttgccaaatttggcatatcactgggaattttttgctaaaaaacctgccggctatcgagattctattagtattactgctatgggcggtttatattttcttgctagttccaattgcagttgtacatgttggaccgattaaaaattggtttttacgcttgctaactatttactttcttgatattcagtacggtgatgcacaaaatttagcaataaatccagattttcgctggcttcattcacttacctatcaaggtgtaatcgcagctattgctttattaacgatgacttgtttcttagttaaagcttggggctatcacttcaatccaaacttaaaatttattaaaagtccaagctttcagaagaagatcttgctggctttattgatcatggcaaccattgatttgttttacaatgagtttatcaactatgataaagcaatttggacagtattctttggtgttgacattggttcatttaaattctcaattcctaatttaactgcagccattgagcccggaattttggaagaaaccgaacgctatttattgatcgtaatttttttagctggttttaatagatttccaaagtatcgcatccctgttgcaatctatggttcagcaattttgtttggccttagtcatttaagtaatttttgctggcatggagaaagttttactgcaacaattgcacaagttattggcgtaatggggagcgcctttatctgggcagaattgtatctctatacaggaaaactatggttgccgatgatctatcactttttaatggattatatttctgatttgcaatctggttggaattctgctggctggtcttggaatggcgaaatcactgattatatttatactgtattaattgttggcgttccattgctattctcaattttgatgcttttcggtaaaagaaggcaagtaatggaagataatgcagatttgattttgaatctaaacggtaggcaaagcatgatttatcagtgacttatattaaagggactataatgtatatgcaagggtaaaataattaagagaggtcataaattatgaaacttaagagaattgtattaagtattgtggctggaactgcgctttttgttcctgcagctttagcgggtcaaaatcaattaacaccggtagttcgggcaagtactctgaagaataagattacaactgttaagagctataccaatccaactttgtataataagaatggtaaagagctaggtagccaagatcggataaattttaagaaaccgatcaatttttatggtcaaccaattgttattcagggacccagggtcagtgcttttattaatcttaatgggatgccacaagctattgttaatggtgaaacctatgcagatttaggtgatggtggttatgtcaacatgaaatcggttggtagctataactggaataataatgagatcggaattattaaaaacacctatatttacaatagcaagggtaatcgtttatcaacttatcgcggtggcaaggcttatttaactaaaggtagcaagattaaatatgctggtaaaagttggactacttatcctgattcatattttaatttaggtgatgggacgtatttaaagtctaataacgttaataccatgaatggcaaaggcgttttgaagctgaatgctaacactgctatttacaataagaatggtaagcgtattagctttaatggacaacaggtttttcctaaatactcaattataaattatgctggtaagcgtcgcactaagacacaaactgacgattactattacacaaacttaagtggtagtaaatcatatgcaattaagaattataagattaaaggtcaagactattattacattggcagaggtgcttatatcaaggcaatgaatgttggtcgcatcaatggcaatccggcatttcgtgatggcggtgcaactacgattgttccgcagacagatttgtacatctataattctaaattaaagaaaactaagcaatccgttaagaaaggacaaaagattagagcggttgatccagttgttctaggcagtggtgatattgcccaactattttacagaattaagggaacatctaactatgtttcctggggtgattatagtgagtatggttttgaagatgatgagcacgtgggctactttaactttcgtgttagattaaatcctgttaaaactattgaaaatgccgctacacgggccgctgaagaatcagattaattgggagtgaagacgttatccatttggatagcgtttttattagattataggaagaggataaaagttcttggtgttgatgtttatacattgctgaatagattagtggtaatactacgatttacgattgttggagagttcgatgaaataggagacagctcaatgattaatgatttactttctgaaattagaatcgatttttggcgtgacatagggttaattattaatgatgaaaagctttttgatcgggtaactgctaattatggctatcatgaaattatgtatcaaaatattgatcattttttcatagaaactaatgacgatgatttcattaaacctaagcgaaaaacaacgtttgaagaaatttatgatttctattgcctagatcaacatataaaaaatgtgatgatgatcagtctgcaattgtttgaacaaagcttcaaagtagcccttgcagaaacagctcttattgagaatggtaaaaatttcaccagaaatcttaatccacgaacaattcatcaaaggcagtttctaaatgaaaaatatcaattaaaagatgggcgagtaattcaccgcggtgatgtgaaagcgcgcatgcggcatattaagcaaaactatcttgagccatatgagggatatactgaggctcatggtgaagcagggatcggactgattattaaagaaatgtcatttggtgttgcaacgaattatttctttttaatgcccatcaaagccaaaaagattgttttaacacgtgtgtttaaagaaaagataactctccgtcaatttgaagaatggctaaatgaaattagatattttcaaagacgagctgcccataacttctcgctgttgattatcaaggaaaaacggcaatttctgtataaattagtactgaataatttgcaccagctggcaaatcaagaaccatgtgaattagctgaggaaagaatcaacaagattgttcaagattatttgacgaagtatccaattgaaaaagattttttgaataaagtttttatggagaaaaaggattaagttgaagttttttataatgatctttcttcaaacaaatgaccataggaacttaaaattctagctaaatcgatccaagtaagactaattgttttggtattatcattgggatgcacaccaactaaattgttttcttccattgctgcttgatcgacaatcaggggaattttattactttgatcattgagcaggctaaatggggaaacagcccctgttttaacttgcagtttttcttctagttcagcttcagtagcgaaggttaaactagaggagagtaattcagctttagctttttgccaatcgatttttttatcttcgggtaacattagtagataataatttttggcgttacgggttttaataaaaagagttttacatttagcaaaatcttcatcttctaagtatttatctgcctttttagttgtaaaaactgctggatgagagaatacttgatagttaatatcatgatcatctaaaagttgtaatatttcttgagtatgcatattttcctcctaataaaaaagtcaggattttcctcctgactgataactatttacgcttttgcttacctttattacggttacgtaagtcttggtgtagttctttcttagcttcagttgtagccttgctttgaccgctattggagttaaacaaagcatccactttttctttagtaacaacagtttcaattggcttatcttttaattcatcggcaatatgcttcttaacactaggtgtaaggacaaaggtaacgattacttgttggacaatcattactaagttaccagcagcccagtaaagagctaaggcaccagagaaggataaactgaagaacaaagtcataattgggttaacaatcatcattgattgcatggtcttcttttgttcttctggaataccaattagtgagatataaccttgaataacggtaaagacagtcgcaataatggctaaaacaacagatttggaacttagagaaataccaaagaatttggattgtgccaattgaggtgaatagaataccgcttgataaattccccacataattggtaactgaataattaatggcaagcagcccattccaccagttaatgaaacttggtttttagagtaaagctctctttgccaagttgataaagtcatttgttggtcaggggtgatccccttgtgtctcattgcattttgaatcaacttcatttgcggttgcagacgagccattttttcctgttgacgtacactcttgttttgctgtactaacatcaatggcatcaagattacacgtacaactaccgtaataatcacgattccccaaccagcaccattatcgccgccaatcatgtgcgcggtttgaatcatgatattttgtaaaggtcggcctaaccattggtaaacccaaccgtaaataccgctgtgcggtgcaacatgtggatcagttgttgccccacaggcacttaatacaagagtagctactgctaataaagccagtactccagcgtatcttttaatttttttcatttaaataaatcaccacttaatttctatctaaaaatgtatgtctctaatataatacatgaaaatcatgcattttttctacacctggaaccgattcttgactaatattttgaatttgggcaaatccagatgcagtaggtagtttttcaataaagcggtcgattttatcactgtctgcttgtaaatagattgtaacggtaccatctgcattatttttaacagtgccaggaatacccatcttgttagctaatgccatggttgaccaacgaaagccaacgccttgaactaagcctgaacaaattaattttcttgtttccatttttatctcccttatttaaattaagttcaactttgattttagcatgatcaaaatagattatcagttataatagattttgaatacaaaaaggagaaaaatatgcaacaaattagttcagttaataatgcaacgattaagaaattagcgaagttaaagcaaaagaaataccgcgatgatgaaggcttatatttaattgaaggctttcacttatttgaagaagcacttaaagctggtaaaaaatatcagtatatcttaggtactgaagaagcacttgatcaagcagatagtgaatatgaagttgatttaagtgggaagaatgtcgtattaattaacaaagcgattgctcgccacttaagttcgactaagaattctcaagaaatttttatggtattaaaaattgatcaaccaaaagaatttccgtttaattatggcaagtgggtgctgcttgataacttggctgatcctggtaatgtggggacgattatcagaactgctgatgctgctggttttgatggggtagttctttcaccagagagtgctgacctgtataatcctaaaacgcaacgtgccatgcaaggaagtcaattccatatcgatttgattaagcgtgatctagctaatgtgatcaccgattttcaggatgcagctattccggtttatgcatcgctgcttgatcgttctgctaagcaattgcctgatttcgaaaaagtgccacaacttgccttaattattgggaacgaggcgcatggcataagcaaaaccattgcttctttggctgatgaaaagctctatattccaattaaaggacaagctgaatcactcaatgccgctgtcgcagccgggattatgatttatcgcttcgcttagcacttgtaattagtaagcggatttactataataatgttagtaatactgaaaaatattttatataatattatttttacagggattatataattatggagggacttacgatgcaagaagttaaagaaaaaaaggatgcagctccttgtaaaccagaagattatgaattgtgctgtcactttgttggtgcttttaagattattggcaaaaagtggaatggtttaattattagttcactttgtgatacccaagatatgcgttttaaagatttagcacgaacgattgaggcatgtagtgatcgagtactcgttgaacgtttgaaggaactagaaaaagaagatatcgtcaagcgtagtgttgatcaaaataccggcatcatttcatatggtttaactaaaaaaggtgctgaacttaagccagtttttgaccaagtacataattgggctgacaaatgggcttagggtattgacattaagtaagaaaaaaagtatattacttaatgtaagttgcttatttaaaataagacaagatgaaaggagtacgaaaatggaatttttaagtataagaaatgttaatactgactgttgttcttgtgtatctaacattgcttttaatactcaagaattcagtttgcgtatgcctaaatagctttaattagaaaataaggagatttacgtcaactgaagtagcgtagatctttttttattgtttaaagagacctatgagagcaatgtcattaagttaagacattgacaaattatcgacttggacttttaagatcattcatttgcgatttatcgcatttgaatgctcttttttcatgccaaataaacccaaatcttgtttagaaattaggctacacgatataaataatatacagctgatttgggtttgagatttcttttgtcttttcgtcctggtctgatcggaattgtgtaatgactaatttgaataagaatctttttaaagatttcagttgaagaagaaattatatacatagcctggatgacaaaacatgactgtttgaaattgatcgcatattgatacttgcattttttttgtggtacatatgcttgagcatcaatttgactgactgcgttaaacataatcatgtgggcatagatctccatttcaataaatctatcctgcttggaatgaaactgtacgctacctaaagcatatttcaactttttgaatgaagtttcaatgccccagcgcaaatggtagatttctttgatcctttttaagggataatcggctctatttagattagttagaacaacttcccattcttctttgcctgatttaggatcattaattctaaatttacaggcacgaaattttattgtacataactctccaaagtcccagctgccatctttggtatttttagaccgatattttatatattgacggtaatgatggttaaccaaatgaacgttttctgtagccttatgggtttcataataataattagaggtagtcacccagcaagctatatccttatcacactcttgattaggcaactcagctacttccttaaatgcgccatatcccgttttagtacgtatgacataataacagttaggcaggcgattacaattttcaatcatgttaaagccggtataacctcgatccatagtaactatatatggtccgcaatttagctttttaagcatttgaacggcggctttacgttcatccatctttgacttaggctgaaagatgcagtcttgataagtattatttaacaggtcatagagtgcattaacatgaatttggcaatatggctttcctttatgattgagatttccaacgatattctctgatttaggattccagatttgattaaaatcagacccatcaatggcaaatatacgatatttatgatcaaataactggatattaaataaattctgattaaatacagttagaatatgcttaaaacatgcgggtgaaagctgacctttgcgttggacataagcggaagtactgactactttatcgttatttttaatagctttttggccaaaagctctaaacaactcactggtcaaatcttttccttgcatattaatagtagttttaatgactgtagctgcatctaaaaaccgcttcctagtgaaggcatgaggatcatcgataaaatcatgaatatgctttccagtatcattgataatttgatcaagacgatctaaaatatttctgtgaagggctttcataattaacaccagctttctggcaataattttgaaggtttaataatttaatcagagggcgaaaaggtaggttcttttcgcctttattttatgcaaaaaaagaaccaaatcataatgattcggttctacagagattagattcaatttgtcaatgtcttaacttaatgacattgcctatgagagtgggtctcttttttgtgtgattgggggatttttaatgaattggacaattatccaacaagccttgcctgtgtttgctcggggatttgagctaacgttatggctttcactagttggcattgtgggctcaattattgtggggattattgtcagtctggtgcaatactttaaggtgcctgtattaagccaaattttgacagtatatgttgaattagctagaaatacaccgcttttaattcaacttttctttttatattatgcctttccagtaattggcttaaaaatgtccgctgaggtctgcagcatcattggcttaatctttttaggtggagcatatatggctgaaggctttaccggtggttttaatggcgtaagccctagtcagattaatagcggtaaagcattaggaatgaacaacttacaattagctcgctatgtggtttttccacaaggatttagcctaagcatgccggctttaaccgccaatattatttttttaattaaggaaacttcgattttttcagtaattgcaattccggagttaactaatacagcccttgacttgattgggatgtattaccattcaaatgaatatttattgatgctggtaattgcttatgcgattattttgattccaattattttattattaacttggcttgagaggagagtacggtatgcttcattcggggattaatgttttgtttgaaggaagtaactttgcccgtttgatggcagggctatggacctcgatttggattgcagctttgtcactagtaattggcttggctgtaggaacaatttttggtattttgagaaccttaaaaaatcgtccattgcgttttgttttgcggttgtacttagaattcttcagaattgtgccaaccgtagttttactgtatttggtttattatattttgccaagaagcttgcacgtcaattggccagctacttggatggcggtattagctttctcaatgtgggtagctgctgagtttagcgatattgttcgtggtgcattggaatcagtacccaaaacgcagcgtgaatctggcctagcactgggtctaaatcgcctgcaactgttccgttatgtcttgttgcctcaagcagttaagttagaactaccagcaacaatcaacttggctactagagtaattaagaccacttctttattaatgattatcaatatcatggaagtaatcaatgtcggtcaacaaatcattgaagcaaataatcaacaatatccagctggtgtgttttgggtatatggctttatctttatcttgtattttattttggattatcccttgtctgcatgggcaaaacgattaactgctaagaattaggtgaatgaaatgacagaagaagttttaagagtagagcatttaaataaattttatggcaagcatcaaactttgtttgatatcaactttagcttaaataaaggcgaggtattgaccttattgggaccttctggttcaggaaaaagtactttgctgagaacggtgaatgggcttgaagaatatgagggtggcgcaatttattttcacggtaaaaaaataaatcctagtccgaaggaatggcaattgttgcgccaaaagattgggatggtctttcaaagttatgacttatttcccaacttatccgtgatggaaaatattttattggcaccggtaaaagttcaaaaacgtgatgaagctgaagttaaacaagaagcagttaagttattagagcaagtcggtttagctaattatgcaaaagtatatccgcgtgaattatcagctggacaaaagcaaagaattgcgattgtgcgtgctttgattatgcatcccgaagtaatgctctttgatgagattactgcttcgcttgaccctgaaatggttcgcggcgtgctagatatcatgcaaagattatctgataacgaacatatgacgatgatcattgttacgcatgagatgaacttcgctgcgagaattgccgataaggtgctatttttagaagacggaaaaattttggaagaaacaccaggcaaagaattctttactaaacctcagactaagcgggcacaagaatttttagagagtatggatttttaggtgtgaatgatggcaaaaaagatttttaattggatcatggctgtcctctttgcggtagttgtggtaattgctggttattttggaattacgcgaccaggaattaacggcactgcttcaggcgacagatggaataatgaaaataatgtatcttcaattaaacgtcgtggctatttaagagtggctgtctttggcgatctaccgccttatggctgggttaattcacaaggtaagcgtgttggctatgacgtgcgcctagctcgcagagtggcgaaagatttgggcgtaaaacctaagtttattcaagttaatgccaataattgaattgataccttgaattctaataaggctgatattgttttggctaacttcactttgacaccagagcgtaaaagcgtggctagttggactaagccttatatgaaagtatcggttggggtgatttcccctaagtcagctccgataactagtccaaaacaattgaagggaaaaagcgtgatcgttactaaagggacgacagcagagaactattttactaaacaaaaaggcgtaaacttgcttaagtttgactctaaaactcagcagtttaacgcgattaaaaatggccgtggtgcagcttgggccgatgataattcttatctgtatgcttgggttaagcgaaatcctaagtttactgtcggcattaagacgattggacctaaccagtatatttctggtgcggtaaagaagggcaataagtccttacaaaaatggatggatcgtgaaattaccaaattgaatcgcgaaagcttttttacttacgattataataaagaattgaagccatactttggtaaggaaattaggagactgtcaagaagtttgtgtaaataatctctctcgttgattgacttttttatttatcttttaatcaaaataggattctagggtgtctcgaacttgcccaaatcctttatgaatcctgttaaagtaacggtcattgtaatccattgcctgaactccaataaaggtgtcaagcgactgctcagttggaaattctgttttaggcttggttttccgcttaagcctgttgttaaaggattcaatcatgttagttgagtaaattgaagctctaatagctggcggatagttgtaaaaggttaacagatcaggctcaacctgtctaagatctctaactacgtttttgtaggctttttcccagttttgatagaattcatgcagcacctgtacagccatttctttgtttgactgagtatgaatctgcttgaattcatccagtgcttttttcgatcgtcaacccgcattttggcactgatattacgcatgacgtgtaccaagcagcgttgaaaatgcgctttaggataggactggcagatagcctctttcatgccaactactccgtcagacaagaagagctctacctgttcaaggccgcgactcttgaagcctttgatcattccgttattaatattgcatgattttccaatagctttggttttattcatgatctttttaattggaacagttgacttaatgtcttggactggataccagattctaatttcggagtctgtttctgaaagtgagttatcaaagatttctggagcagttggcctgattagttcaattcaaaaaacatttggaccaggtatagcagctattattgttaacctctttaactatctcggtggcttcatgctagattcgatcagttttggctatttgacttatgttgttaaaggtattgagactacaaataacgagaacaatgataaaaaaaagaagagtatacagcaaaccttatcacaaggtttaaaatttgttttgaaagaacatgatatcaaatggttaattattagttttcttgctgccaatgttggctttcaagtagtaataccgatgttaactttcttattaaaagtacaaacacgtgcttcaataaatgaaattagtatattttttactatctcatcagttgctagtatactgggtaactttgtttatctacactttagtaaaaaaataaagctaggcactcaattaatagttattggattaattattactgtaggattcactattatgctggccattaaatctttattaatatttaccatgggatatgcaatagtatcatttggtagtgtatgggctcaagctaatttctttaccattattcaatctaagacacctgaccaatataaaggcatggtaactgctacttcaacgtctctgacaagaattacaggtccattaatggcaacgctaagtggtatactagtaagaatatctccttccttaatctttttcgtagctattgtatgcttagttttatctgtattaataactctgattagtggtttacagcaattagataagctagccaattaaaacgaaatcataatccatatacagattacttatgtaaccgtaaattctgatcttataggtggaacataagctaaagaaaagaagattatgagatggaatagctactagaatgttgtgttgttttataaatttaaaaataagtgcagtcttctttatatctatttgtgagagatctttataaataaaaaacaaattattttttatgaaatatttatcttcctaaaattcaaaaaatatgagatataaacagtatctttacaaaaagcttgcaagaaacaggtaaaagaaatatcatattaattaattactgagatcaagactagtagcagatattttttctgaacagagagtcttctttcaaaagctgcaagagaagatagaaagaacgctgtgaatttcatcttgggagtaggatctaatcaattccggtatttcaccgttaacgaaaacttaagtgtgggcgttgctacgtccaaactagggtggtaccgcgatgcttcgtccctattggggacggggcttttttgttttgaaaggaaagatttaatggacttatttgataagttaaaagagctccatgaagaagggcttaagcaaatcaacaaggctaaagacgaaaaaactttgaatgatgtcagagttgaacttgttggtcgtaagggcgaattaactaagattttgcactcaatgcgtgaagttgcgccagaaaatagacgtgaagttggtcaaaaggttaacgaattacgtgacttgtttaatgctcaattagatgaagctaaagaaaacattgttcatgcaatgttagttaagaagcttgaagatgaaaagattgatgttactttgccaggtcgtgaagcacatcttggttcaaagcacccaatcaacattattttagatgatcttgaaagctactttattggtatgggctatcaagtagttcaaggtccagaaattgaaactgatcactactgctttgaaatgatgaatatccctaaggatcacccagctcgtgacatgcaagctactttctacattgatgatgaagatttgcttagaagtcagacctcaggtgatcaagctagagtcctagaaaagcacgacttctcaaagggtccacttaagatggtgggaccaggtaaggtataccgccgtgatgacgatgatgcgactcactcacaccaattcatgcaaatggaaggtttggttattgacaagaacgtaactatgagtgatttaaagggtactttggaattaattgccaagcacgtttttggccaagatcgcgaaacccgtcttcgtccaagttacttcccattcactgaaccatcagttgaaatggatgtatcttgctttaactgtaatggtaaaggctgccctatttgtaagtacactggctggattgaagtattaggtgctggtatggttcaccctaatgttttggaaaatgcaggtgttgactcaagcgtttacggcggttttgccttcggtgttggtcttgatcgtttcgctattttgaaatacggtatcgatgatattcgtgacttctacaccaatgacgtacgtttcttagaacaattccgtaaggaggaaagataattaatgttagtttcatacaattggctaaaatattttcttgatttagatggtcaaaatccatacgaattagcagaagaaattactcgtagcggggttgaaattcctgaccgtattcatccaatggatggcttgaagaagttagttgtcggccgtgtccttgattgtgaaggcgttgaaggtactcacttgcacttaactcacgttgatgttggtgaaaacgaacctttgcaaattgtctgtggtgcacctaatgtagctgcaggtgaagatgtgattgttgctcttcatggcgctcgtattgctggcaatgaaaagattaagaagggcaaaatccgtggcatggaaagttacggcatgatctgtggtttacaagaaatcggctttagcgatagcgtggtaccacaagaatttgtcgatggtatttacgtattcccagcagatgccgaagttaaacctggtcaagatgtatatgaagcacttggcatggatgattacattttgaacttcgacattactcctaaccgtgctgatactttaggcatggaaggtgccgcttatgaagtcggtgctattatcgaccaaaagccaaaggttgaagaaaaggttgtcttaaaagaagatggtccagcctggacagattcactcgatgttaaagttgatgaaaagcttacacctaagttttacttacgtaagctcgagaatattaagattcaagactcaccactttggttgcagcgtcgtctttggaatgcaggcattcgtccaattaacaatgtagttgacgttactaactatatcatgctgttaactggtcaaccaatgcatgcttatgacgctaagacttttgctaacggaaagtttgaagtaagacttgctaataagggtgagaagcttactttgcttaatgaaaaagaagttgaccttgaccctaaagatatcatcattaccgatggtaaaaagccagtaatgatggctggtgtcatgggtggacttgattcagaaatcacttcagaaactacagatgtcattcttgaatcagccatctttgatccaactttagtcagaaaggcagcacttcgtcacgctaaccggaccgaagcttcaagtcgctatgaaaaaggcgttaactgggatgccactgaaaaggcaattaacatggcagcgcttttacttagaaatgacgctgacgctactgttgatgaaggtattcttaaggcaactgaccaaaagcgtgaaccagttgtggttaaaactactgcttcatacctcaataaagtattgggcactaagttatcagttgatgaaattgtaaagatttttgaccgtctttgctttaaggtagatgttgatggtgataatttagctgtccatgtaccaaatagaagatgggatatttcaatcccagccgacttagttgaagaagtaggccggctttatggctatgacaaccttgaatctactcaacctgttttgccagaaactcatggtggctactcagaaaaagaagaaatgatgcgccgcatgaaggcaattgttgaaggacaaggcttgatggaagctatttcttactccttgacttcacctgaaaaggccgttcgttacactaaggatccaaaagaattagttgaagttaaatcaccacttaactcaagccgttctgcaatgcgtgagaatttgatgactggattggtagatgctgctagttacaactttgctagaaagcaaacacaattagctttatttgaacaaggcagaacttatgaccatgatggtggtaaattcaacgagcatgaacatttagcagctatttactctggcaatacttttgcggaaaattggcaacatttaacccaaaaggtagacttctactttgttaagggacagttaaccaatttgttcaatgcaattggtattgatcctgaaaaagtggtttatgaggctaaaggcattaaggggatgcacccaactagaactgcaggaatctacattgataagcaatatgttgggatgatcggaatgattgctcacgctgtaacgattgctgataaggcacttcgtggtagcgagctttatggctacgaaattgatctcgatacaattattccaatgttaactaagggcgtaactgcagtgcctgcacctaagttcccagcaattcaacgtgacctttcacttttagttgataagccagttactaaccaagaaattgaaaacgtcattaaatctaatgctggtaagtacttaactgaacttaaggtaatcgatgtttatgctggtgctcacattgatgttggtaagaagagtattgcttacaacttaaccttcttgaacagaaaagatactttaaccgacgatgttgtcaataacgcgatggacaagattgttgctgctcttgaaaatgatcttgcgattaaagttcgttaaaggttgacattattgacgtaaattaatattattgatcagtgcaagataaagaaaattaatttctgaggagttaaaaatatgcctgaaaaatcttatccaatgactgctgaaggtaaagaaaaacttcaagcagaattaaagaacttaaaattagttaagcgtccagaagttattgaacgtatcaaggttgcacgttctttcggtgacttgtcagaaaactccgaatacgatgcagctaaggatgaacaaagtcaccttgaggatagaattgctcaagttgaagaaatgcttaagtatgcacaagttgttgatgcagaaagcgttgatcctaacgtagtttcagttggtaaaacaattacctatactgaagttggtactgatgatccagaaacttacactattgtaggtagtgatgaatcagatccattgaatggcaagatttctaacgattcaccaattgctcaagctttattgggcaaaaagaagggtgaaaccgtatcaattaccactcctggtggcaagtttgacgttgtaattaacgaagttaaagcctaataataaaaagggagggtagctatgactatcttcctttttgtttttttgaaaggattttaaaatgagaacagttggtattattggcatgggccatgttggtgcaaccgttgcctatactttatttacgcacagtatggttgacgaactgattttaattgataaaaatgaagctaaagtaaatgctgaatacaatgacttgcatgatactttggctagaaatgatagctatgttaatgtgcgaaagcaagattgggacggcttagaagatgctgacattattattaccgcttttggtgatattgcggcttcagttaagacaggcgaccgctttggtgagtttgaattaaatgcaagaaatgccaaagaagttggggcagatattaaagaatcaggctttcacggcgttttgatcaatatttctaatccatgtgatgcaattacccaaattttgcaagaaacttctggtttaaagaagaatcgcgtctttggtactggtactttccttgatactgcaagagttcaaagaataattggtgaaaaacttggtcaagatccacgtaacgtagaaggtttcgttttaggtgaacatggttcttcacaatttacagcctggtcaacggtaagagttaacaacaagattgctttccaattgtttggtgatgaagaacaagaaaagattagtgaacaatcaaataagaattcctttattgtggctaagggaaagggctatactagctatgctattgccacttgtgctactcgtttagttcaagcagtctttagcgatgctcatctatattgtcctgtttcagtttataatcctgaatacaagacttatattggttatccagctattattggtcgcgacggcattgaggaagaaattgaattaaagcttacttctgaagaaaaagaaaagttgcaagctgctgcagataagatcaaagaacacttgaagcaattgaagaaataaaaaatagtcattataaaaaaataaggcgagaattacagtcattgtagttctcgtcttatttattgcttattttagttttacatcccaagcggcaatttgcttgttgccgtagtatttcttgtaaatttgcttggtctttttggtctggtatgctttaacaatttcttgataaatctttttatttttatccttagtgcgggcgcaaataatattgatccattgctcagagtctttgttcaatggttcgacaaagatagtttgcttgtcacctagatgtgcagggccagcaaagtcattgttgacgacagcggcatcaacatcatcgatcacgcggctagtttgttcagatgcaacttctttaattttgaagtggttaggattggcagtaatatctgcaacagagaccaatactttgcctttcttcaatttgatcaacccggcatttttcaaaacaaaaagtgctctcgattcattggtgggatcgctggggaccacaattgttgctccttcaggtagtgcatttaggctatgatattttttggaatataagcgaataggtgagatataggttttaccgattgcagtaattccgccatggttggctttgttccaggcgttgaggaaagcatagtgctggaaggcattcagatcaacgtcaccggatttaagtgccttgtcaggttggtcataaccatcaaaacttttagtggttaaaataatcccatatttctgtttgacggtttgagcaacgcttttccagattgcaatgtcacctttgctggcaccaacgattcctacgctaactttggtttgaccgttgctttttggcgtccaaaagaagctgaagtaaccagctacgataatcaataagctaacaatggtgccaataataatattccgctgtcttctttttctcatttttctttctctcatatgcaaaaaaagcacccatcctcaaaggcaatgtcattaagttaagacattgacaattaagggtgcttttttagagatcgaatcatttggattcgatctctttttttgtataaaataaaggcgaaaagaccagccttttcgcctatcttatatattatatattttaaaccttcaaaattattgccagaaagatggtgttaattatgaaagcccttcataagaatattctagaacgtcttgatcaaattatcaataatactggggatcatattcacgattttattaataatcctcatgcttttaccaggaaacgcactttagatgcagcgacagtccttaaaactacaattaacatgcaaggtcagaatttaaacagtgaactctttagagcttttggcgaagatgcaactaaaaagaacgataaagtagttagtacttctgcctatgttcaacgcaaaagccagctttctcctgcttgttttaaacatattctgactgtttttaatcaaaatctatttaatattcaactttttgatcatcactaccgtttgtttgccattgatggctctgactttaatcaaatctggaatccgaaatcgaataacattgtacaagcttcttctcataaaaagaaaccctattgtcaaattcacgttaatgccttatatgatctattgaataatacctaccaggattgtatttttcagcctaaatcagaaatggatgaacgcaaagcggctgttcaaatgcttaaagctttgaattgtggtccatatattgtaacaatggatcgtggctacactagtttcaatatgattgaaaactgcaatcgcctgcctaactgtcattacataatacgaactaaggctggacaaggcggagttaaagaaataacgacattgcctgatcaagaatgtgatcgtgagatttcctgcctggtaactacttctaactattactacatcacgcataaagccagtgagaatattcaccatgtccagcatcattatcgccaatatattaagtatcgctctaaaaatacccaggatctaagctgggattttggcgagttatgcacaataaaatttcgagcctgcaaatttagaattaatgatgccaaatcaggcaaagaagaatgggaagttgtgctaaccaatcttgatcgaaaaaattatccgctaaaaagaattaaagagctttatcatctgcgttggggtattgagacctccttcaagaaattgaagtattctttaggcagtgtacagttccattccaaacaagataaatttattgaaatggaaatttatgcccatatgattatgtttaatgcaatcagtcaaattgatgcacaggcctatattccgcaaaagcattgcaagtatcaatatgccatcaatttcaagcaatcatgcttgattattcagagcatgtatttggcttcttctttaacgcaagattttgaacggatccttattcagatcagctattataccattccaattagaccaggccgcaaggacaagagaaatattaagcccaaatcagctgtatattatttatatcgcgtagcttaaaaaagcagaatctgtgctatgccttatttgttgtacgaaaaaagcaccaatttaaccaattaaatgttaaatcagtgctttaaaagtctaatattaattgtcaatgtcttaacttaatgacattgcctcaaaggacgagtgcttcgtgttaccacctttatttgccagctatttacataactgacctcaatagctatctaacaatagcttgcattgttaacgagagcaaccccgatactagctaaatatcactagtataatcattctgaatccatcttcattaagtagtttcttttacttctcaccaaccagtaattctctgtaagaaagctagctataattactctattcatcaagattttttaattattgctattaatttatcatctcgttttaattttgtcaaataaatttttttacttagttaaaaagttagtaacggaagaaatagtgagaaaaagtttatttttgtcgattaacaaagtagtaaatgagtgagacaaccgattcagccaacatcccaccggccatccagtacattgccatcatcattttgccggtaaaagtaaagtaggcagtaatggcgtaaacaattacccaaataattttccaaaataagttattcattcctgagcacattttgaagctcctttatttttgactagcaccagaactgctgtcaacttccatgccgcaaccttcggtatccattcctggcatccacacatcttcaggtttaatgcctctttctttagcaaaggcgtcggttaatgtcttcatatccattaacttgtatgtctttgggtgtttagggtcgaatacttcgatttgagccatcattccggcatcttcgtgttcaataatgtggcagtggtacatgaagactccagtttgtgggaattctacacgcaagcggacggtttcacctggtctgacaggaatggtgtctttgtaaccatattcatttggaaatggcttttcgccatcacgtgaaacgactgtaaagtgtgtgccgtgaatatggaatgggtgcaacataccgtgttccttagagttggtattagttacgtcccagtattcagcatgactaacttgttgcttcatatcgatccgctgcattgcgaattgcttgccgtttatcttgttgtgatcatccatagttactttacgaatcggcaaatcttcagcgatttcaggaatttctggtttgaataatgtatcaggaataacactgttgtcaggtgcaaacttgtgaattctaaattcaattagtttgaaatcatcagtataaaggttaacgacatcgccatcatggtaatccttgaagtcaactacaacttgaagccgttcaccaggtgttaccaagatcttagtcattttgattggatgaggcaaaaatgaatcgtcacctgcaatttgagtcataactaggtcatcatcaaagtgcaagcgccattcacgacggttagacccacctaagaatagtaaacgaatcttttgtgttgttacatcaacataagggcgaaccgtgccgttgattaatggtgtttcaccgaagacgcccattgcatcataatcagcgcgatagtcaagttgattatctttgtggaaagtacggtcttgcaaaataactggaaactcgtcaacgccatagtttttaggaattgggagtttagcttcgttttcatctgttactactacgcccatagctaatcccatccaaacttgggcagcggtggatggacatgggtgagcatgaagccatgttaaggcagctggttgattaacagtgaattcgatttgcttttcttcacctggataaacaggggcatgacagccaccatcagtaataggaccaggaacttccatgccatgccagtgataagttgttagttctggtaaactattttttaaggtaacgtgaactcgctggccacgttttaagaccatggttttacctaacaaaggagcgttataaccccaagtcttggtcttagctccaggcaatatttggctttcgctttcaattgattcaagagtgaaccagacatcagtatcagtttccttatccagtgcaagaactggagggacagctaatggctgagcttctacaccttgagggatgcttaatttcttgtagtggaagtggtttttgtcaaaatcttcatctttgataaagtaattagtgtatatcttatctgtcatcttattaaccccattcttttgacactaacttagcatgattttttaccgtcttcaaggcgcaagaacgctgttatttaaaggcttgcatgtctattataactatgtaatgaaaaatatttttactattttgtaatcacttatacttaggcggattatgttattttacaagatttgttgccttgctaggcttgcgtgtctccggtaaactaagcatgaagaggtgactagatgtataaaattattgcgtgtgacttagatgaaacgttgttgagcgcagatacgcatgtctcagtagaaaatagagaagcgattcaaaaagcagttgctcacggtgtaaaatttgttcctgcaactggacgaggctacgtttctgtccaaaatactttaaaggaaataggattagagcaggcagctaatgaatatgtgatttcattcaatggtgccagcattacagaaaataagaataatcgcgtgctgtattttgacggcttgcctaatgaaattgcggatcggttatatcggcatggggttgaactagatattgccatgcatgtttacactcaagatatggtatatacgtatcatatcgatgatgatgaacgtgcctatatgacgggacgacaccagtttaaagagattgaagataaagacttgtcatttttggaggggcagaaaattgccaaggtgctctatgagagtcttgataataattatttgcaccggatcgccgctgaattaggaccaattacgcaagaattggatatttcgtattcgtctaatcgctatttggaatttaaccgtaaaggtgtcaataaaggcgcgggactgatgaagctggctgagcaacttagggtgccgattgaagaaacaattgccattggtgataattttaatgacctgtcaatgattcaggctgctggtgtgggtgttggtgtagctaatgtcaatcctgctatgaaagagcaatgcgattacattactcaggctgataataatcatggtgcagttgccgaggcaattgatcattttatttttaacaattgaaaaaaataaaaaaataattgacatattaaaaatacatgatattattgtttacaataaataaaaaaatgagctttgataaggaaagtaacttaagaaatgatttgcagagagtcttcggttggtggaagaagataatgatgaattaagtgaaaatcacctttgagctgaaagtgcgatattagcattttcagggtccgccctctatagcggcgacgtatcgctgattttgatagaatcagccgcacgtgcatgaggtagaatttttgtgagtattattctacgaataaataggtggtaccgcgttgaagacgccctattagatcaattgatctagtagggcgtttttttattatcataagcttgttgttaattttttgacttatgggagagataaaaatgagaaaaacattgaagcacttatttggcacgactgtagtagcacttttaggtgtaagtactttatctgcatgttcatcaagcaaatctggtgctaaagcacctaaacaagaattgacctggatgactacctcagaaatccaaactatggatccttcaaagatggtagatacaactggtagtgaacaggcatctaatgtttttgaagggctcaatagactgaataaagcgggtaaagttgtatctggtgtggctactaaaactaatcagagtaaagatggtttgacctggacttttactttaagaaagaatgctaagtggtctaatggtgatccagtgaccgctgaagattttgtttattctttaagacggacacttgatcctaagacacaatcacaacagcaaaatgagtggtcaaatgtagttaatgcagatgatgttttagctgggaaaaaagctccgtcgactttaggtgttgaagctaagggtaaatatgaattggtagttcacttgaaacatcccgtaccgtattttaaagccttgtcagttggttggaatccgcaaaataaacacgtagtcgaaaagtttggcaaaaaatatggaactgcatctaagtatatggtttacaatggtccgtttgttcaaaaaggctggactggttcaagtcttaactggaagttagaaaagaatgatcaatattgggacaaagataaagttaaattgcagacggttaattatagtgtacaaaagacgccttcaactgattacaatctgtatcaggctaacaaattagatggtgcctatcttgatgttcaggcttcaaagagactgaagggtcaatctggttatacagtctataaactagatagaactgaatacttgactttcaatgtatccaagcatccagaactagctaatgtcgattttagaagagcagtttcaatggcacttaaccgagctcaattggctaaaacagttggtggtgctaataccgtagctcgaacttttgctggaccaaatgaatatgttgatggtaagaattttgaccagtatgttgaaagcaaaaatccagctaataagtatatgaattataaccctgcaggcgctaagaaactttatgatagagcattaaaagaattgggtaagaataagttggcctttaccttaatgggtgacgatgatgacgtttctaaaaaggttttagagtttgtgcaaagccagttagaagatacctttggcaaaaaagttgatgtaactgttagaagcatgccgaagactactagagttaagaaaatgctcaatggtgatttcgaggcagtctttactggattgacttcgggctatttagatcctaattcacaattgcacacaatgatgacaggacaaagttataacttcggtaaatggtctaacaaagattttgacaagtatatgaataattcagataaggaattaaatcctactaagcgattagaagatttgtataatgcagaacgtgttttaactgatcaacaaggattgacgccattattccatgatggtcaagcttggatggttcgaccaagtgttaaaaatgtagaattcttgggtggtaatttcagctttaaggatgcatctgtaagtaataattaggagaaaaataatgactaaaacagcttttgtaaattgtaatttattcgttggtaatgaagataatctagtagataatgcttggtttgtcgttgatgatgaaacaggtaaattgaccgatcaaggtaagggaaaatgcacagcagattttgacaaacaagttgaccttaaagggaaatatgtgatgagcggtttgattaattcacatactcacatggggcttgattctgacttgaagaaaaaatttccgactactgaagcttcgactacttatgcagcactgcgggatctgcgtgaagctttacaaactggtgtgacttatgttcgtagttgtggcacatcctttgatgttgactgtaaattagtgcagatgcgcaagcagtatccttttgaaggtcctcaagtgatgccaactggaatggcaatgtcaattgtcggcggacatggtgatttcaaggtggggttaaatggagagcaaaatgctagtcatttggttaacggtccagaggacatgcgtcgggcagtgcgtgaacagtttgccaagggtgctaaaaatgttaagctgatggcaactggtggaattatgtcattaggtgatgaagttgatgatactgaactttctcttgaagaaatgaagatggcagtagaagaagctcattctaagcatatgacggtttgtgcccatgctgaggggagacgcggtattcattatgcggttgttgcaggagttgattcggtagaacatggtttttatttagatgataatgacttggctttgatgaaaaaacaaggtacatttttgtcaccaacattgactgcaggtcggacaatcgtcgttcatggaaaagatgttgtacctgagttctcataccgcaagatgtgtgcagtagttgatgacttttataatcatgttggacatgcaattaaggaaggggtgaaattggcaatgggtaccgatgcaggaacatacttcaatcgcttttctgatacaccaaatgagttggtggaattagttagagcaggagccacaaattatcaagctttaagagcaggcggcttgggtagtgctgaattgcttaaggttgatcaagaatatggttcacttgaagtgggaaaatatgcggatttcttagttttacgagagaatccattagaaaatgttgctgcagttggtcaaaaagataaacaagtttaccaacatggtttacgtaaattctaaatattttttatcacaaataaagcatcctcgtgagatttttcttgcggggatgcttgtttgtgtagttcaaattaaagtaaacattttactaaattctccagtaaaagcgaataaacataacccaaaatataaaaatagttcttgatttagtatgaattacgatgtagtatttaagccatcaaacgtattactgatgatttgaataagtggagattgaaatgtcaagttttcaagaatactactcagaattacaggaactagcagggtatttactacacaatccagaattaggctataaggagtataaaacttctaaggcagtggaagcagaaattgctaagatttctactaatataaaaatcgaacattattgtaaaacaggacttaaggtaatgtttgataatcattgcccaaaaactattgggattattgcagaattggattcactttatcagccaggtcataaggatgctgaccctgaaacaggagcggcgcaagcttgtggtcactatactcaggtgacaacagccttggctttgataaatgaactgatgaaaaatgatcgtctcaacgagtttggcactaatttggcttttatttttactccagccgaagaatttgtagatcttaattggcgcaaaaagcataagttagctggtgattttacttactttggaggtaagcaggaagccatcaaacttggcgtatttgacgatattgattattgtgtatcagttcatgctataggtgaagattttgagcgtaggactattgaaattaattgtgatttagctggatttaattttcaatactttgacttctttggtaaggcgagtcatgcagcatttgctcctgaagagggggtaaatgcacagagtatagccaccctatttaccactgctttggccttcaaacgtcaacaattaaaaaatccaaatcaaattaggtttaatccagtgatgataggtgataatacagaatcgattaatgtaattcccgatcatgttagcatggggacagatatacgatactttgatgtcgaatatgcacagcaactaatgaagcaattcaatcaagcagcagaaggatgctccctagctttaggcggtaattttaagtcagaaacacaggttggctatttgactttaaggtcgaatagagacatgaatgctttagtaaaaaatgtatttttaaggaatgacaagatttcagaattgattgaaaaccgaggctataccatggcagctggtgatattggtgatgtaagttatctaatgccaactattcagattggatatggtggttggaatggaaccattcatggctctgattttaaattagttgatccagtttttgtactggacatattcccggaatttatctttaacagtgttttagaaatatcaaataatcttaataaaatcaggacttatcgtagaacaaatcaggaatatcttgaacaattaaataaaatgggagcagaaaaatgaaatctttaaaaaattatggtccattaattattttagtgctattgattgacactattgcggaatttatagggatgcaggttttcaaaattggtaaaattgaagtttcaattctaccattagtattcgcagttattttagcgattattatttatttacttccattaaagccgattaagcaactctacaatgataaaagagtaaagtttgctggaaaatatatgattttaataatgttgccactaatggcacgttatggagcaaatgttgcacctaagattaatgaaattttatcagtaggttgggtatttctcattcatgagttaggtaatttaggtacaattttatttggactaccagtagctttattactaggattaagacaagaggccattggctcaacattgggattaggcagagaaggagaactagcctatattagtgaaaaatatacacttgattcaccgaaaggtcgaggagtcctaggtatttacttaattggaacaatttttggttcgattgtcttctcaattttagcaccagttcttttggggatgggctttagttatcaagctgttgcgatgagttctggagtaggatcaagttctatgatgactgcagcttcttcagctttagcagctctggttcctaaacatagtgagacgattctatcatttgcggcagcaagtcagttgttaactagttttattggaacttatattatgtatttcctcgcagttcctttgcaaagattcatgtatgttcacttgactagtttgcttgataaaaagaaagaagtatacccagaacatgattagagaaaataatttttataaattaggtagagatgcattaattttattgcttagtgttagtttagttttatttgttcagtagattaagttagtaaaaaatcctaagagcaccccaattacacctgatacttttgccggcctaggtctattatggctgttttctctgattggcattattatcagtatgttaatgaaacgagttccgtggaagattgttagaggatttcccattctaggctgggtgtctatcgtttcattagttttctgtttgcttagtccatattgtgttcgtgtaattaatgcagtagattttttatcattaactacatcggtattagcctttgccggaatttcagtaactcatagattgaaggatttatcaaagatttcatggaagatcttaattgtggcattatttgtctttttcggtatgtatttcatggatactttgatttctcaaatagctcttaatttgagtggaaaatagaaaaaatatataaagccacgctcaacagcgtggctttttgaagtgtgtcgggcatgacattcatctagtccaatgaaagcttggcgtaccgcaaggtggaccgctctcgccaatcctatccaatatctatttagataaaatggacaaggaattggaacaaagaggcttgcgctttgttcgctatgtcgatgactgcaatatcttcgtcaagagtggtaagtcggctaagcgcgtgatgaagtcaattacatcatggctagaaagaaaactgttcttaaaagttaacactactaaaactaaagtagttagaccaacgaagagcaatttcctaggctttaccttctggaaaacgggcgaaaactggcaagcaaagccgggagacgaccgtaaagccaagctttatgacaagattagagaattgttgagtcgccataaagcagttgctcaacctctatcattagtctttactaagataaatcaagtggtcaaaggctggggtgcaggcgtttttggctttaacgcaaaagaagtcgcaaaaatgtggcaggaggcctttgatactccgacaagcatctccactgtgatttacgctgttattcctggcagaaagaataaagacgtggtagctgattttaaggatatttttgcttaaatagaaattttctctcaaataacaatccaaacaaaaaagacgagccaatgcccgtctttttattttcttgaaataaatttttagttaaaagttagcttttttaacgtaagtgttcttagaaatacgatagaaagtcttgccgtgtaatttaattgcgcgaccataagtgttaacgcggtgacctttcttcaaaactttcttattagcacgcttgccgttcttcttgtagacataagcattgtgcttcagagtccgcttaacggccttagctttcttggcagctgtctttttagcagcagcggcatcagtttgagtcttgtcagatgtagtattggcatctttattagcagtgtcttcagcgaccttacctaaagtaatatcagccttttcgttcatggtcttgcccataacgttaagaccgaattctaagctgccagcgccttctttataagcatctgctgagaaaacatagtcaagggatgagccgtctttagcaacattttcttgcttgccggctacaccattcaatgttaggctagcaaccatcttagacatgtcttgacctttggtcattggtgctttagagccatcaacgtgaataattacttcggtaactttaccgtctttaacattaacttgagcagagttgcccaagaacatagcagcttctgatggggtagtgctgccagttttggtaatagtcatagtgatagtttgcaagtcgctgttttgactagtagcagtagttgcagcaacattagtagcaggttgatcagctgcagacactacagctgatggtgccaaaacactagcgcttgcgagtaaagcaagtgatgttaaaatgattttagtattttttctcataaaagtttcctcccacgaattttagatatcgcttacattataatcaaataaatgttataaatcaatatattttttgttattttatttttttatgagcataataaactgaataaaatatgaaactgtcaaatcttttgtgtaaatagatctttctcgtaaattgattttttaattatttatttaatcaaagtaggattctaaggtgtcctgaacctgaccaaagcctttatgaattcgattgaaataacggtcattgtagctcattgcctgaatgccaataaaagcatcaagcgactgttcagttggaaactctgccttaggcttagctttgcgcttgatcacattgttaaatgattcaatcatgttagtcgaataaattgaagctctgatctgcttgggatagttataaaagaccagcagatctggttctatgtctttcaagcttctgataacatggctgtaaaccttgccccatttggtatagaagtcatgcaggacagctgtggcttcttctttgtttgtctgttgatgcacctgtttgaattcgttcatgatcttttcacgatcgtcgacgcgtactttagcgcagatattgcgcatgacatgaaccaaacagcgttgaaaatgagctttaggataagtcctggccaaggctgttttcatgccaacaacaccatcagaaagaaaaagctcaacttgctttaagcctcgggatttcatgttttgaagcatatctgtccagacttcaatgttctcgctaggcgcaatgcagtagtcaatgacctccttgtgcccattaggcttgatgccaatggcaatatagactgcttcacgctcaaatgtttctcggcgcaaaggaaggtatgtcgcatccaaatagacgcagaaaaacttgtcgcttagcttgcgtttgtggtaagcctcaacctttggaatcatctgcttggaaatatttgatacctgagctggactgtaatggctgccatacatcttttcaattagatcggctatttccctggtggtcacgcccttggagtaaagcttgataatcatgctttccaagatatccgagtgctgcttgtagccaggcagcgtgtgctgatgaaattgaccgttgcgatcccgaggcacttgcacttcaattgggccaaattgcgtatcaactttgcggaaataagcaccatttctagagttgccagtattccagccatttctggcatagggatcatagcccagaaaggcagtcaattcagcttctaacaagttattaacagcctgttgtagctctttgcgcaataaatcatttattttgtctggattgaatagagcttgagcaaaatctttggtaaaatcattcatgaaggagttcttctttctgtatgtgtttttttgttcaaaccaatcatacgagaaaggaactcctttttctaatgtttaaagaaataaatttaaggaatcattcatccttacacaaactattttacagtctctaaaatatcatcttgaaaccgattgcatagttattttaagaactttataatagaaaagactaatagtattaatagtaaaaagaaggatattagaatgaataaaaagttacttaagttaatcgcaagtagttcggtcgcaatgactttaatggcacctggagtggcatttatgcaaactaatccggttgtaatggccgctgaacaaagtcaaaagacagtgggaatgacggtttacaaatacagtaaaaatcaccgcagccatgctaagtcaatggctcaaggttttgtgggagataaggtgcaattaacagttagtcaaaagcatgtgactaagatgacaatccatgtcgatggtaaaaatagtccaatgggcaaggggcaaaacgtaaataagattgtaaaatccctcaagattaatggcgttagcggtaaaaaggaaaatgtttccgccgacaaatctagttttgactttgtttttgcaggaaaagctttcaaaaataatggttgggtcaagatgcaagtcactattgactttggtggtaagatgaccgaacaagcttgggtgaagtatgacaaggttagcggtttaactactagcaagaaaaagaccgacaagaagcaaaagaaggctagtaaaaagagcgtcaaaaaagttagtaagaaaagtacacacggtcagcgcagataaaaaggttcaaaatatcaattatgcggtctataaggcggatcgcagtggcgtttctgcagcaaataatttttacacgcatcatgccaggattgaaaaagtaaagcagggctatgttatgaccttaaaagttgaggtaaagcatgggatggtgaccaaatttcagccggtttcactgggaattggttcaatttcaaacctgcgttttaccaaacaagctggcaaggatatctggacttatcaggtccacttcaagtcgctaaatcagttaaagaagcaggctcaggggagtctgcgcttgagcgtaccaattgccaatattcatgatcgtttgtttaaggtctggtttgcttttggtgtaaaaaatgtggcgcacagttcgactgtaagcaaggcattaaccgaagcaaatagtagcactgattcaagtagtactagtgatgctattactgcagctaatgacgacagtagtaaagatgcaaaaaatgctacaagtagcgctcaaccgcagtcaaagccagttaaaaagcagcagtcttcttcaaactctagtgtaaaacctggggcaaagatgacacccaagaagaaaaagatggcgacgattgcagcggtggaatatccatttttgcctgtgatcgcaggctttttagcatttgatgctgcaattattggtttggccttttacttaagaaataaaattttgaagagaaagaaataatgaaaaatatagctaaaattatctcttttcctttcttgttgctaacttgtttgtttatttttggtgtgactgttagtgcacaaagcgtgagttatcgcacttacaagtatggcacgcatcagacctcgatggctgatggctactatgcgcgtcctgctcaggttgtggtagacgacaatcagtacctggtaacgatgacgattcgcactaagaaagatctaagtccctatccggttcaggtgttaacgattgatggacaagcaccgctaaacgtagtaaaaacgcggcatggcagtgactatgattatcgctatagttttcgcactaataatttaaaacgtgatatttctagtcaaattaaaatagatgtgccacatgtttaccaagcaacacacaatattacttttgcttttgacactacacagttgcctaagttaacaaataaaaaagagcgagcaagtcatgcggaaagtgcgataaaacgcagcgcgccacaggtgaaaaacaagagtgttaagcctaaggagcaattggcacaaaagaagcaagcggcaatagctaacaggcaaatagcgcagaatgcacgcaatcaacgtgctaatcaacaaaggcagcgaaatttttattatgttattttggctggagtgcttagttcgttaattttaattggcgttgctgttttgattgtcgtaaatgccaaggaaagaaaaagtaaatgaaaaaacgtaaaggattaattattggtttaattatatttttagtagcaatcgtcggagtggcaattggtgctaaacgattgattgatcaaaaagttgccaataatgaaaagattgttgccacaagtgcagcgattactgaaatttttgataaattgaacgttaatttagcaggggttccaaagacgcaggctaagttaccagcacgctatcaaaaggtgcccaagattgggagtccaatgaagccaagtgttgaaaagattgcttctttgaatcccactcgtgtctatgcagtctcaactttaaaagatcagtatgatcaatcatttaaagaacaaggcgttaaagttacatatttgaagctggattcagtagctgaccttgaagctacactgagttcattaggcaagcagtattaccggcagagacaggctgattatcagattggcttaatcaaaaaagccgttaaaaaggctaaagcacgtgttcacggtcgtaagcctagagtattgatcttgatgggcttgcctggcgctaattacatgattctaactaatcgatcatatttaggtgatttggtcagaatagctggtggggaaaatatctatcactctgatagtcagatttatttgtcaccaagtaatgactcgctagctactaaaaatccagatgtcattttgcgattagaacatgctttaccaaatgtaactttgccacaatttaagcaagagtttaagaaaaattctgtttggaagacgatgaaagccgtaaagacaggcagagtttatgacctacagcaaccagactttaatgcttcagctaacatgaatgtttctcaagcattgaataaattaagcaactggttgtaccctggaaagtgatcaaaatgaagaaaaaggtaatttggataaacttgattttagcagttttgttaatcagtacgattttctttgcattaactcacggagcaagcaatttttcaatgcaaaagatgactaacagccaattgaatattttgtttaatatccgtgtcccgcggattatttcggcactagtagcaggagctagcctctctgttagtggtgccttttttcaggcaactttgcgcaatccgattgcagaacctggaattatggggatctctagtgcagccagtttatgtcaattgctagcggttattattttgccagaaattttctttggtaaaattattttcgcgattattggcggactgctagcgtttgggcttcttttattattccaaaaaaagatgacgccttatcagttaattatcatcggagtggcattgaatgcagtgttcacggggatgcaggaagttttcactaatagtcaaaatagtggcagcagcctggccacaagtagttggggatcgacgatgtatttattgattattggcgtagtagggctgattttcgcgatttgttttatgaattgggctaattacttgaaggtcaatgatgaagagctgacgtctttaggtgtttctgctaaaaccctgcgtttagtcttgatgctaattgcagtggttttggccgcaacaacaacggcttgcattggtgttttagcttttatcggaattattgtgccacaggttgctcgtttgcttttgggatatgattatcaaaaaatcattccattttcgatttttgctggagcttggtttttattgttcgttgacaccatcggccgggtgattacagcaccgaatgagattgcggctaatattattttggctattgttggtggtccagttatgattttaattttatggaagaggcagaaaaatgcttaaagcgtcgcagattgatttttcatatgggtcaaaacaattatttaatcaattctctctgagcctgcaggagcaccagattacgactttaattggtcctaatggatctggcaagtcaaccttgtttcgcttgcttacacgggcaataaggccgtctgcggggacaattacgctagatgggcaagatatctggcagctagctgcgaaggattttgccaaaaaggtagcaattgtccaccagcagaatcaattgtatgatcagataactgtcaaggaactggttaaaatggggcgtctgccgtatcattccttgatgggggatgaagaaaatggatctgctcgccttcaacagattatgcaggagctagagattgctgatttggcagataagtttatagcgcaattatctggcggtcagcagcagcgtgtgtggcttgctacagcactggcgcaagagccggaatatctttttctagatgaaccaacaacatacttggatttgcattttcagtatcgctttttggatttagtgaaaaaattgaatcgaaagcagaatttgacgatttgcatgattttgcacgatttgaatcaggctttgcaatatagtaatcaggtaattttgctcaaccaaggcaggattcaaaagcagggcaggccagaagaggtaattacggcgcagacgattaggcaaaactttggcatagattgcgagatgatcgaaactgagcagggaaaagtcttgttaatggcaggttctgaggcaaaataaaagaccacgagaaaactcgcggtcttttttgtaataataaattattacttgttaacttcatccttgaagctcttacctggcttgaatgctggaacgtttgatgcagcaatttcaatttccttaccagtttgtgggttacgacccttacgagcagcacggtgacgaagttcgaaggcaccgaagccaactaattgtaccttgttgccttcagcaacattgctcttaacaacgtcgatgtaagcgtccaaaatagtgttaatgtctgtcttagtagcatcagtctttgcagcgatttgatctactaattgtttcttagaaatagtttccatgaaaaatacctcttttaatataaactacgattacttattttaacagtaatccgcgtatttacaaggggaaacagcctctttaaagaatttttttaaaaaggaaagaaattctatgtatttgaagcgaaaaatattgtattcgctatcaaaaatgtagttcatgtaatgattcttttgttttgatttgaaaaattaacttttttcaaaaaatttagacattttttgcgtaataaatgatgggagacaagcctaaattttgaattccaaattttgtacagtgatggaatatataagagaggtgaataatctttaattacacaaaccacatcctcgaaatatgcttaaacaatatcaattaagaacgttgaagaatggattaagaatggcaggtataagactatgagcctactaacttataaaggttaccaaggtacttatcgaagttgaaaatgatactttatttggcgaagtcttaggtctagaaaatacttttatttcttatgaaggaaattctctggcagagttgaagaaagatttcaaagcgggtattgatgattatcttgagaattgtcaattgaatcatgagcaaccagaacaggctaaccaagatgcagctaagttacagttgcaaaaattattattaacatcattagcgtgattggaacaaaataaagctcgaaacttctacaaattgtagtaacttcgagctctgcattaatctgtttttgttcaatacaacgcatgctattacatattggcaaatcgatctagttcatcatgtgttcctaatgcaaccaaaactaggattagttcatgtgtttctttatcaatccggtagtacaatagccaatcgtcattatattgacgattaacgtgcattttgcgattttttcctacagggtgatctttatgtttggctagaaattctttgtcattggttaatattgcttcaacacaatcatcaacataatccattggataatgttttctttcatatctcttgtaagcgcggtagtagcgcttggtaggattaacttgcatgattatttccgcatggcctttttgtattcttcaaaagagctataacttccatgataaatgtgattatcagcttcatagttcgcttcatctagttctgtcatgggtcttagttctaaaggaatgccattacttctaacaatagctttgaaatacattctaattcctgttgatatgtcaaccccatatgaagcaagaatatcttgagcttctttttttaatttatcatcgatttttacactaatttgagccatagtacaacctctattcacaaaacgtattactttatctatatagtactatatactataaatacaaaatatcaatttttagcgtttgcttttaaaagaattttaaaagattataggtagtcttattatgaatactaggggaaaaaactaaaagtgacatttatatctttaatcgtaatacaccagcagaaatttaaacataaacaaagctcgaagcttctacaaattgtagtaacttcgagctttttgtaactattcagaaaagataatttagcggtcttcgtggttagtgaagtaacggtagtccttactcttgtcgaacaatacggcacgagcgttttcaccgttggagattgagaagatagcgtcagggtacttgttcttaacttcatcttctaccaatcctctaagcatttcgttgttagctaaaactgaaccggttaaagcaatcttcattggcttaggatcttcgtaacggtcaagaccgatgatgatgtcacgggctaacagatgagcttgtttcttaataactttgattgcatcatcgctgccttcatcagcaagttgtgcaacgtgaacagccattcctgcaacttctgggttagacatcttgtagaatttagcgttacattcatccatgtgttcaacgccaaataatttagtaaacatttgaatcaaagcgttgtcttcacgcttgtcccagctaagaagagcagattgcattgctgaacgagcaattgcgtaacctgagccttcatcacctaagatgttgccgtagccaccaactgcgattaagtggccgttttgtaaaccgttgtaaactgagccagtaccggcaattactaaggcaccgtcatcaccttcaagaccagcgtaaagtgctaaaagtgaatcagtaatagcacgagtaggtaagttgttaattcttgatgaaatagttgcggcaacttctggagcattaccgacaactgaaagaccggcaataccaacaagaacgcgcatgcagtcaccatcaaccttgtcgatcaattcgttgatagtgtcagagatattcttaattccgccttcgtagtcagcgttaatttggcctgggccgccttctgcacgaccgatttccttgccagtttcgtcatatgcgattgcagttgagtgggtaccacctgcatcaacaccaatttggtatttaagagccatgttgtaaatcttctttctatattaatttatccgaatgataacgtatacattgtattatatttttatacagtaggtctagtaaaagttttgctgttagcgctaacagtggcttttttcttgcaaattaataaaattgttaaactaattaagctaaccaacatccccagtagaagaacccatggtacataaattaatgtaatttgatgttttcctggattcaacttgaagtttaaaaaagcattcatgaacaaggttttattcttgttaattattttgccattatctaaaactaaccagttaatgttattaggaatagttgacgccaatgtcatcatcttcttcgttgtgaaatgattagatttgatgatcaaagcaggtgtttgtttaaagtttggttgtttttgcttaaaacgatgtataatctgctcgagcttttgtgtgtttaagcgccagaagtgaatgccactaaggtctagtttatctttttttagttcaaaagtaacttgcaaccgttgaccacgctggtggctacctagattaatgagacgggcattttgatcacgtactgccagattaatattagcaccattaactgtcattgaaatggcattatcatcgatctcaccgggcatttcaatgtagtaagaatcatcagtctgtggtttgaaattgaaaatgatgcgtgcgatttgcttattgtttttacgattatattgtagttgatcgtttttcatactagttacattaattaattttgctttaggccaattgatctgcttaaacagctgcacttttgcccctgtaactgcttgaaagaatttggtttgattactagtaatatctagagagttaaaattgattttttgcgttttttgtgatgttaaaaagagtaggggcaaagcggcattatttttcactagatatagttgggaaaagcgtttttgcaaatgataatcgctggcatcaacgcggtggttggaattgtcatacttcatttgcttaccagacttgatcgttgtgatttcatcattaggcaaaagataatatttgattccaagtaaatcatctgtcaaagtagttccgccaaaattagtgtaggaattactattgtttagaaatccaagattgttgatcaggttgagtactttttgatcagaaatcgaattaaaattacttaaaccgtaataaccagcgctaaaaggatcatcatcagaacgatagaaagtcttttcagttcggtaaaatccagaatcatgttgatttgcgtattgtactgcttggctgacattagtggtaaagttctgataatcgctatttttttgataagctaaattgcctagagatagtactaggttgacgattaactcaagctcgataactaaataaaaaaatggcgcggcaaaactgtgttgatgataaataaagccaataaacaagattccgagggctagaaaagctcccgtggcaatctgcgcatcttcagttagaaagtcaaaatgtgaggcattaaatactatataaacaattaaacctaaagaaaatagagtcagaagtccggtctgccaataagctatacgttctttttgttctaatgcaataacgcctagatttagcgcaaaaaagatcaacacaaagctgaaacgaccaggataccagacagggaattggcctaaatgccagagtaaaaccagtggtgtccaaaaaagagaagcaattaagaaaatgagtaaaattccgtttgctaatttacgctgccagttaatctttttgcttaaaaaatataaaattgtcagcaacaagaaaggcattgtcagataaatgttgggcatcccttcctgcatttcatgaaagttataggccccttcggctaacttagtcagctgttcaactggagaaaactgccagcccaaattccatgaggcagtagaactagccttgccttgcaacatttcaatcagaacggggaagagcataaaggcatctaaaaatgaaccagcgatactttttcttaaataaatccagttaaggcgtaggcgctcctgcttattgatgaagaaaattttgcttaacagataaagcaaaccaaaggctaatgccataaatccggtataaaaattagtgaaccaaagcaaaaaggtaattaaaattaacttattttttcgttgggccagcaagcggtcgatggcattaatcaataaaggaagcaaaatcacagaatcaagccacatcagattatagtgattgccaataacgtagcctgaaagggcataagccgaactagccgctaaagcgtaaaagtgattagtgattttttgcttccaatagtagtaggaagatagtcccgccgctccaatttttaatgcgataataattaaaattgcttgtggcaaaaaatgttgcggaaataaaaataagagtagattgaaaggactgcagagataataggcatcagttgctagcattgaaccgcctaaaccattagaaaaggaatagattaagcgcaagggatgggagaacaaatttcgcctgaagaaggcaagaaaatcaacatattgttgacctaagtcgacagtgagcactccatttttgctgtagaaaaagtaactcaagaaaatcaaagccggtagcaaaaaactaagccagaaaaaaatatttttacgattaattgcaatgtgtcgtgagttaagaaatttaagcatcattaaaaattatataagctcccttatgaattgtagaattgatgtttactttttgttaaaatacatctagttttaataaaggtgatttacgtgaattattttagaaaaaatagtgggactggctcaaacaagcattcctcaactccaattagaatgcgaatcattctaggggtaattttagtcctctttgccatgttaattgggcaattggcttatttgcaactagtttatggttcacgtttcaaggcagaagtgcaaaaaactgattcaactgttgtttcgcatcaagtgccacgtggtgtcatgtatgacgctaagggacgcgttttagtaggtaataaagcaaccaatgctattacttatactaagagtgcctcgactacaacagcagatatttacaagatatctaatgccttgagtaattatatcaagattagcgatgaaaagccgacaaagcaaatggcagcagattattatttagctaatgaagataataatactaagatatctaatgctttgccgaagtcagccaagattgatgctgatggcaataagaagacttcagctgaaatctatcaagcggaattggcttatgttgaaaaaatgaatcctcaactaaccactcggcaaaaaacagcggctttaatctttaataagatttcaggggcttatactttatccacgatttatatcaagaataaaggcttaaccgatcgtgaaattgcccaagtaggtgagcacttatcagagcttcctggtgtgggtatcggaactgactggcaaagatcttatccaaatggttcatctattcaaagtatcattggttcggtttcaactgaaaaatctggtttaccaagtgatagcttgcagtactacttaagaaatggttactcacgtaacgaccgggtaggtacttcctatcttgaaaaagaatatgagccacttttgaagggaactaagtcgactaaccaggttattactaaatcgaatggtaatatccagcagactaagactgtttataatggtcaagccggtgccagcttaatgttaacgattgacgctaagtatcaaaagcaagtacaggctactttgaaacgggtttacagtacagctgttggtaacggtgcagcaagatactctaatggtgcctatgccgtggcgatgaatcctcagactggtgctttgctagctgtagccgggattaatcgaaacacgaacactggtaaaacgactgataatgctttaggtgtaattaaccaatcctttgttatgggatcagttgttaagggggctactgttggtggtggattaattaataaggttattactcccgaaaacaatactttgcctgatacggcaatttatttgccaggttcaccagttaaaaagtcagtttatccagttggtactttcagttcattggatgctgaaacagcgttggaagtctccagtaatatttacatgatgtacttagcaatgaaatgggttaaggctagttatgtaccgaagagctacattcatatgccaaacgatgcctttgacattttacggcgtaattttgctatgtttggcttaggtcaaaagacaggcgttgacctacctggtgaagtgtcaggaattgaaggtaagtcatttaatgacaagggtaatattctttccggttctgtacttgacctagcttatggtaactatgatgcttatacaccaattcaactagcccaatatgtgtcaactattgctaatggtggtaagagattgcaaccttatattgtgcaatcagttggtaaaactagcaaaaatggcaagaagatttacattagctacaataagaagccaaatgtccaacaagtaattccttggacgcttgcggaacttaatgtggttcaaacagggttctatcgtgttgttcacggtacaaatggttggggaactgctcacccattgaaaaatgttaagccatcaatttctggtaagactggtactgcacaaactttctactatgatgctgaacaccctaatagaaagcacaatatcgaattgattaatgcaacctttattggctatgccccatcgaaaaatccaaaattagcagtggcggttgttttcccaggattagaccctgatggtgaaggaacatacacattgcaagttgccaaagcaatggtacaagattatttcaaacttcattcaacaaaataaagaataatactggtcaaacagcttgaaaaatgctattctagtacagtcagaataaaagtgtaggtggtgaaaaaaatggcagataacatcattttagaatgcaccgaatgtggcgatagaagttacttatctaagaagaacaagcgtaagcatccggaacgtttatccttaaagaagtattgcccagttgaaagacgcgcaacacttcaccgtgaaactaagtaataaaccaagatagcaggttacgtgcctgctattttttgttttttggacaaaaagatggaaaaatcagaattaagaaaagaacaaatcagtaaattaaaagaatttgccaatactaaagaaaaaagagcagaagatgcgattttattagagaaattaatgtctacagatctaattagaagaagtcagacgattggggtaactgcttctttaccactagaagtagatacttctgaattaattgctcgtttgtgggataaaggaaaagaagtttatctggcaaaggcacgaggcgatcaaaatcatactttagactttttacgctatacgtatatgagcaaattggtaaaatctaaattcggtgtggaagaagtcgccgatgaagatgcgaaaatcaataatgatttggatttagtcattgtgccaggtttagcctttgccttagattcgcatgttcgacttggctttggtggaggttattatgatcgctttttggctaagcatgatcctaaaactgttgctttagccaatagcaagatgacgttcgatactagcatttggcctatcgaaaaaaccgatattccggttcaaacaattgttactcctgataaaatttattaaaatagtcacaatgacgaagataagggggattaaatgaatactcaacgaaaaattaacctctcacaatcatttgtgactttaggaattttagtagttttattaataatctttttagttgaagtgtttttaggtggctcagagaataccaatgtcttgatgaaaatgggagccatgaataattttgccgtggtggctggacaccaatggtggcgcctatttacggcccagtttttgcatattggcatcatgcatttggtttctaatgccattattatttactacatggggcagtatatggagccattaatgggacatgtgcgctttttagtaacttatcttttagctggggtcggcggcaatctaatgagcttggctttcagtgctgatcgcggcttaagtgctggtgcctcaacagccttatttggtttgtttggagccatgactgccattggcttgcgcaatttgcataatccaatgattgcttttttaggtcgacaagcctttgtcttagcattgattaacttagcgcttgatatttttgtgcctggaattgatatctggggtcatattggtggcttaattgccggcttcttattagcgattatcttgggcgatcgtgtaatgaagacctacaatcctaagtggcgcgtattggctgctgcagtgttagtcgtatatgttgtttggacggttagaacaggaatgataattaatttctaatgaaaactctctacgatgtacaacaattattagaaaaatacggaattttggttcatgttggcaaaagaatttgggatattgaattaatggctttagagctcgacaatatcaatcgtgccggtctgattgaccaacatgattatttgattgccaagatgattttgagtcgagaacatcgaattgaagtcaaaaatgaacaaaaaaaggcgcttaaagatccgaaaaatgatagccagtaaattagtttagcggtatcataatagatgtaagtttttatgaaagggcagatttagtttatgtcgagttttttaattgtcttagatttagttttattagtcattattttagtcatggttggtatctgggcttggaataaaattcaagctaaatcaattggtggcgaattgactaatgaagaatttaaagaaggcatgcgtaaggcacaaattattgatctgcgtgaaaaagaaccgtttaaacgcaagcatattgatggcgctcgcaacttgccatataccatgcttaagtatcaatatactgagcttagaagcgacttgccagtttatctttactcagattcaaagaccattactttgagagctgcccgttttttaaagaaaaagggttttgtttctatccattggcttaaagatggctttgaagcttgggatggtcgaactaagaagtcaaaatattaaatgaaaagaagacgcatttggagggggtaactctaatgcgctctttttttgtatcaaaattaagaaaggtgatggggatgaaaaaggtactagcgattgtaggaccaacagctattggtaagacagacttggcgattgatttagctaaaaggttgaacggcgagattatttctggcgattccatgcaggtttaccaagaagtggcagtgggaactgcaaaggcaactgcagaagaacaagcgcaagtgaaacactacttagttgatacgcaatccgtttttgacgagtattcagttaaagattttgtggatcaagcaacaaaagcgattgaagagattagccaaaaaggtaagttaccaattattgcaggcgggacaggtttttatgttaatgctttattgaataagatgcagctaggcgagaaaactccagaagagcgtagcgtttcgcaaaagtgggaaaactacctcaaggaaaaaggcgcagaaaaattgtggcaggtcttgaatgagcaagatcctaaggcggcagaaaaaataccagtagccaatagtcgcagaactatgcgagcattgactgtgattgagcgtacaggcaaaaagttttcagagcaacaaaagcagatcgagccccgttatgattacttgattattggcttgaattctgaccgtcaagagatatatcgcaggattaatttgcgtgttgataagatgatggagcaagggatgctcgatgaagcaaaatttatttatcaaaatcgagcacgagagtatcaggtcttgcaagcaattgcgtataaggaatttttcccttattttgaagggcaagagacgctagagcatcgcattgaagatttaaagacagcttcgcgccgctatgctaaacgtcaattgacttattttagaaataaattaccagtagtttggtttgatccgttagatgatccgggttgcgaacaaaagatattgaagaaagtcaaggaatggaaaaatgaataatttgccagaaaaattacaaaaaattgttaaagaagttgatcaacagatcgcacctaaactggttgagattgaagatcaaattgtctataatacggctaaagttttggcggcttaccaagctaatgatgtcgctgaagccgatttaaatggggctaatggctatggcgacgatgatatgggaagagataagctagataagatctatgctcaagtttttcaaactgaagatgcggtagttcggcctcaatttgtttcaggtactcacaccttgtttgtagctctagcaggtaacttgaaatacggcgatacgctaacttatttaactggacagccttacgatactttgcaaaaagtgattggcttgactgatgataagcgtggtactttagtcgagcgcggcgtgcatttttcatatgtgccgttaaccgatgatgggttagttgattatgacgaggctgaaaaggttcttaaacgtgatcagcctaagatcgttgccattcaacgttcacgtggctactccaccagaaagacctttacagttgatcagattaaggacatgattgcctttgttaaacgggtcagccctaagagtattgtctttattgacaattgttatggcgaattttcggaaaaacatgagccaactgagtatggtgctgacttaatggcaggatcgctgattaagaatgctggtggtggtctagctaagaccggtggttatattgttggtaaaaaggacctggttgaaaatgcaaaacttgcattgactgctccaggctgcaccgatgagggcgccactattggcaatttgcatgacttttatgaaggctttttcttggctcctaatgttaccggtatggctgaaaaggggatgatttttgcggctgctttgtttgccaaaatgggcttgaatgttaccccagcttgggatgagaagcgaagcgatattattgagacaattatttttggtgatcctgataagatggttaaatttgtgcaagaagtacagaaaaactcaccgattgattcctttgtaacgcctgaagctgtgcatatggagggctatgaagataagattattatggctgctggtaatttcgtttccggttcaactattgaattttcagcggatggtccaattagaccaccttatgcggtttatatgcagggcggcttgacttatgcgcatgacaaagtagctattattaacgcggttcgtgatacattttttaacaaaaaataaaatttaaaaataatcactagaccaatttgacttttttaaattggtctgctattgtattaaacagttctaggagataagaataaatcataggaccataccaatttaatattttttgtttttataggtgaattaactatgagtaaacaatatactgcagaagaaattaagcaagaagttgaagacaaggacgttagatttttacgcttggccttcactgatattaacggtactgaaaaggccgttgaagtacctaagagtcaattagataaagttttgactaatgacattcgctttgatggttcttcaattgatggctttgttcgtcttgaagaaagtgacatggttttatatccagacttctcaacttggacagtattgccatggggtgacgaacacggtggtaagattggtcgcttgatttgttcagttcacaccactgatggcaagccatttgctggtgatccaagaaataacttgaagcgtgttcttggtgaaatgaatgaagctggattcgacacttttgatattggttttgaaatggaattccatcttttcaagttagacgaagatggcaattggactactgaagttccagatcatgcttcatactttgacatgacttcagacgatgaaggtgcaagatgccgtcgtgaaatcgttgaaactcttgagggcatgggctttgaagttgaagcagctcaccacgaagtaggtgatggtcaacaagaaatcgactttagattcgatgatgctttgactactgctgacagatgccaaacctttaagatggtaacgcgtgcaattgctagaaagcacggtttgtttgcaagctttatggctaagcctgttcaaggtcaagctggtaacgggatgcacaacaacatgtcattatttaagaatggcaagaacgtcttttatgacaaggatggcgaattccacctttcaaatactgctctttacttcttgaatggtattttggaacatgctcgtgccattactgcaattggtaacccaaccgttaactcatacaagcgtttaattccaggttttgaagctcctgtttacattgcttgggctgctaagaaccgttcaccacttgtacgtattccaagtgctggtgaaatcaatactcgtttggaaatgcgttcagctgatccgactgctaacccatacttgttacttgctgcatgtttaactgctggtttgaatggtattaaagaacaaaagatgccaatgaagccagttgaagaaaacatctttgaaatgactgaagaagaaagagcagaacatggtattaagccattaccaactactcttcacaacgcaattaaggccttcaagaaagatgatttaattaagagctcattaggtgatcacttaatgcacagcttcattgaatcaaaggaattagaatggtctaagtactcacaatcagtttcagattgggaacgtcaacgttacatgaactggtaaaaataaataagtaattggaaaatctcgtggtgattgaggccacgagatttttttgtaaagtatagatttttcaaaagcatatctaatcgtaattagtctaattacgattagataagtgaacttatggataagtttttaaatctagtaggataaacttttaccaaaaatcaaaaaatattctcttcaaagaagagcaaactgctatataattgtaataatgactggactggtatccctaattagtttagggatacttttgtgttaatgagaatgtattggagtcgatggaatgagaaataagacattagtagcattttgtttgatagctgcaatgatcaatttaactgcttgccaatcgcaaaagcagactaataatcgccaaactattgaaaaatctggtgtgactcagaaacagactcccaaaagattaattgttaagagtatgtcagatactgaaaaatctagtgcaatctcaatttatggatcgatgaaatatggggatgcatggaagactgcatatagtgatgccaagaaaaatcatttgagcattagtgtaaaaaatcgaactggttttaattggataaaaaaaggtagaggttacatttatgaagtaactggcaatggtcaagaaaataatgctttttatacaatgaaaagtgaaaccgtatatttttataatcagaagaaaaatttaggtgtagcaagtttatctgaaatagcttcatatttaagtgaacataatcaagtaaaatctgtagaaaaattagcaactaagactactttggctgctgaagttacatctgacaaatatggggttaagggtgacgatggcctagcattagttccaacgagactttggggtacttggtacaactataaaggaaagaagttagtaattactgatcatactgttaatggtgaagaaattcatcatatttctaattctggtgtagcagcagaatccttagatcaaacgaaaaagtgggctagagctcggatcgaaaatattaatggattaaattgctatcatgttcaaacattgaatgctcaagattttggcttactttattctgtccaaaaagataatggcaatacggcagtagtaacttatagcgttgatacaggtcattatacggctacttattggaagagcaccaagatagccaaggaacaccgaaatgcagaatttaagactttaaattaatatttgtaaagaagtattaaaataattgcaatgaacaagaagtataatttttgtaaaataatcatgtaagaagttggcggatcgtattttttataatactattaagcaaagagatagaattattgaaagaaaaggggattccttttgaaaagtaaattaactgttttggttgcaatttcagctgctttaactttagcaggatgtagccaaagtacacaaggtaatagtaattcacaatcacagtcagaaaaatcaagtcaagtttctaagagtaactcagaaaaaactggcacctcagaatcaagtaacagtcaaaactcagcaaaattatctgctgagaatatggactataagacgcaggctagtgcaatctctgtctatgctgcacaaaagtatggcgacacttgggaaattgcagttaatgctgccaaaaatggtaatttaggtgttgcgttcagaaccaaagccgcaacaggtattacttctgatgactcaggatatgtttatgaggtctccggtaccggtaaaagcagtaatgctcgttacatgctaaacggagatggagcacaaaagaaaattactatttttgttaagcaaagaaaccttggtactgtaactttacaagatgtagttgattacattaataaaaataatgatgttgatctagttcaaagcttggctaaaaatgccaaactaaatgttaaacttgaaggcgataatgacaatgcagctggtgctaaggaatctgctagtgccgtaattccatcaagcttgcaaggtacttggtacactgcagatactggcaatggcaatatcgatactttgactgtaactgctaataagatcaatgatgaagctggttttagcatggatgtaaaggctaaaaattcaggttcatcaactagttcaggctatatgaaacaagctactattaatggaattaatttctatagttttactaatatgggtcaagaaccaggtcaaggcagtacatatttggcaccgcatactgaaaatggtcaaagtgtaattgtttcagctaactctaagggaacaactaatgctgtctactggaagagcgaagccttggctaagcaaaactccaacaagcaatttagcgatctacagtattaaaagtgaataaaatatagaattaggcgatatctttgtgatatcgccttttttgttgtgaaaataaatttctaaaattatggcacttcctttcaaaacatatgtttgatataattgtaaaagtgtttgggcagactaatgaactgactattgagtaataaggaaaggaattatatggattttttagctcaaaagaaggaataccgttttaaaaatattgaaaatcaagtgtgtcgtgttcatactcatttggctattaacaacaataatttgaaagtttggagagaaaatgatgataagaaaagtagaaaggctactaagttaataatggattcactacaagatgacaataaatacatgtttcctgatttagtaatagttagttcaaaatatttgaaggtagtagctgcttacgatcgcgaaaaagatgttatttatgttaataaaggtatctatactcatcaaattgttaaatcgcatttaaagtcaagttatttcgttgctaaagatatgagaggaattttgtggcatgaatatggatataaattacattgggatgcagttaaaagcttttataaagtacataaaagtaagtataatgatatatattaaagaagcaaagatgttttttgattctaaacttgagcattatataaggctacagtatcctggttatcttaggaaagtaatcagttcgtatgcagaagatagttactttaaagaacataaaataaatgaggtagtagctgagttttctgtgataggaaatacgtgtgataaagaattgaatacaattattagggggatgctagaaaatgcaagtgctaaatgatttgaaaatgccgaataaagaaacactatattttaatgatcatattgtcccttggatagaaaaagaagagtgggctaataatgagcatacagaagtcgctttaacttttaagaaaaacaccccagtagatattattaataaatttttgatttgtcgatctgaattagcctattaactatactgcagattataaaattgtataggaagaccacatgttgtatccatatgcagaatttcctggggaattgtcaattacatattctcaaataatggtagacgataatgtaaagggtggtaaaaagcttttggtccactttgaacaaccgacagattatggatttaaagaagccagatatgagttgcctgattataaagaaatttacaactacgactttacaccttctgaaactagaaataatctagatattcttaagagaaacgaaagtctaatttggaagtgtgccgaagaggagaaaacaagtacctaattattttcggcttaaaaattttactatgactacaattgattttcatgactaataagaagaactcactataagtgggttcttttttaataattacaccactataatatcttaagtaaagctaaaaatgattcagttagaaaagagtaaatatgaaagtcttaaaaaaagtgggattagcgttgttgtcagtgatactggcatgtgtaattatcttctgtggctattatatatatttgtctctacattattatcgaattcctgataatcaaagattgaaaattaataacaatcagtctcagttattaaaagcgggggcgtagctataagacaacgacttataatgttggctttggtgcttataatcatgatttcgacttctttatggattcaggtcagttgaaggatggcaagaaaccgcaggggcatcgagggacagcaatatctaaacaagcagttcttgattccactaatggtgtcattcaaacaatgaaaaagcagaaccctgactgcatgtttttccaggaaattgatactgattcaactcgtagctttcacgttaatcaggtgaaaaaggttgaagatgattttccaaaaatggattcaacttttgctagtaatttccactctgcttttttagcggttccattgaacaatcctcatggcactgtacgttcagggttgttgagtatgagcaaatataagatggatagtgccataagaagaaaatatcctgtttctagtgggcctattgaaaaatttgtcgatttagatcgttgctttgtagttatgcgctttccagtaactaatggaaaagatttggtaatgattaactcacatatgtctgcttatgataagggcggtaaaatgcgtaaggcacagatgaaactgatttcttctgtgatggaaaaagaatatcgacgaggtaactatgtcattgtcggcggcgactttaatcatgcgttagggaaagacatgatgactcattttgagcaccaagaagaaattcctagttgggtatccgttcttgatcaaaaaatgctgcctaaagatttcactatgattaaggcgcaaaatcgcgaaaatgttgcgactgttcgtgctacagacatgaaatatgatcctaaagttaattatatgaccatttgtgatggctttattgtgtcgaaaaacgtgcaagcaaaggcgtataacattaatactcattttgagtatgcagaccataatccggttaggttggagtttgaacttaagtagatttggacaaaatgaaaaacactggatcatgaaactgtagatttatgatttagtatttacgaaattaacttatgaggtaaaatctaatgaaaaaagaattatcatataaaggttattatggttcagtggagtattcattagaagatgatactctctacggtaaagttattgacatcaacggtcttttatcatatgaaggccaatatggggtgaaataagatgagtaagattcaagagttcatcaagaaagatattgagagacatccagaattaaaaaaagaatatgaacaggtagaccttgatttagatgcttcagtattagttaaagatatgcgcgaaggttgggaaatgagtcaataagactaactgaagaatagttagtaaaataatgaaaagcattaaaattatatttgacttttaaaatgatttagactattatcttaatcaacataattattaattatttagcgatgataaggaaagtaaattggcggtccttctacagagagttatcacttggtgaaagataatgatcgacctacttttgaaaatggcctttgagcttgaagctatgaagtttttagtagcttctgggtccgcccgttatagcggtaacgtatcgccagacggccgtacgcaattcaaggtggttttccataaagataggtggtaccgcgttactgaacgccctattagatcaagttgatctagtaaggcgtttttctttttaccgtttttagcaaaggagatttttatgagaataaataaaaaagttgtttcattcggattaatagctttaactacggcaaccttagctgcttgtggtaagcaatcagatagtaataccgtttcaaaaaagcaggttttaaattggtcagagatcacacagctttctacgcaggatccttctttggcaactgatactaccagttttcaagctcttcttaataccggggacggactataccgccttgataaaaacaataaaccgcaattatctctagctactaaggctaaaacttctaatggcgggaagacttatgatttttatcttagaaaaaccgcaaaatggtctaacggcgatccattaactgctaaggattttgtatattcttataagcgtactgttaatccagtaactaagtctcagatggcattctatctttaccagatcaaaaatgcgcaagcaattagtaagggccaaaagtctccggataccttgggtgtttctgctccttctaaatatcatttgagaattcaattaactagaccactgccttacttcaagattttattgtcgtggccattatttttcccgcaaaatcaaaaagtggtgcaaaaatatggcaagttatacggcacgcaagctaaatacacagtttcttcaggcccattcacgcttactagatggaatggtaacaacaagacttggactttaattaagaataagaattactgggatgctaaaaatgttaaattaaataaagttaatgaacaggttagcgaatcaactacgactagctataatctttttgaagcaggtaaggcagatgagactggacttactggtgagcaagttgccgcaaataagaataaagcaggctaccatgcacgtttgtcttcagcgattaaaagattggaacttaacgaaaataaggttccagcattcaagaatcttaaggtacgtcaggcattttctttagcaattaatcgcaaacaattagcaaataatgtcttaaaagacggttcaatcccagctaaaggcttcgttccatcaggtatgggcaataatcctaagacaggaacaccatttgaagatgatgcttacgttaagagtgcagtatcgtataatcttgctaaggctaagcaattacttcgcgaagggtataaagaatctaagactaactcaattaaaattaccttgttagtttctgatgacgatacttcaaagcaaacagctgaatttcttcaaagtaagctagatcaacttccaggtgttcaaatttctgttcaaacaattccatatactcaattgatttcacgtcaaacagctggtaattaccaagctacaattaaaaactggcaggctgtctttggcgacccaatcaacttcttggacgttttccaaaaaggatcaagttatttgaacaatggttggaataacaatcaatttaacaagctgttgaatgaatcagaaaacgtatatggcaatcaaccagtaaaacgctgggcaagattagtagaagccgagaaggtattgatgaaagaccaaggaactattccattagttcaagttgctaagccacaattattaaagactaccgtaaagggcgtttcctttaaccctacaggcgttccatacgattttaagaacgttagaattggatagaaaaatagccgttgattacttgtataaaaaacaagttttcaatggctttttttctgttttgtgctaatacctaaaaatatccagttagatttcaggtaaaacacttgaacaaaacaaaaacgccttcaataacagaagacgttttctagagtgcgaagtattatgaattatccaattaatctcttcaccataattattatatcaggtatataaggttaattggttaatactatctatgaaatatagttaaatcagatataacaaacgataatcatatcaggctatttgttgtatgcatcgtatttttcatttaagacagaagtaatagttcgagtcattctatcgtgatatttattattctttaaaagtagcgtagtaattacgtctattacatacattattgaaaactgtgagttaataaaccgagcgtcgttaatataatttgtatcttgaacaccaactacaatatcagcaagctgagctaatgggctattgtcatagctagttaatgctacaactgtagctttattcttttttgctagttcaatggctcttaccaaggaatctgtgctacctgttgaagaaatagctataatcaggtcatcttttgaaatgatactgctagtcataaacatattattactttctgtttccgcaaacgcagatatacccattcttagtaatctttgagtagcttctaagctggtatatccagaagaaccgataccataaaaataaactctctttgcagatttgatgagttggattatcttttttaattgttttatatcaagtttattttgtgtttcagatagaactcgattgtaaaaatcatatacttggtgagcggtcgttttagagttatcttgattagtaatagtatttacttgtgaagaagctgcagcagcagccaatttgacttttaaatctgtaaaactagagcagttaactctacgtgcaaatctagtaatagtagcattactaacttttattgttgacgctaattgatttatatttgctgattgaataaactgtgggtcctgtaatataaataaagcaatttttctttcttgctgaggtaaatcgggtagcctattttgtaaatcagttaaaaacgtcatattgaaaaccttcttaatgtgttaaatcaaaaaaacagagaaagattttgtaatctttctccgcttaattatgctaaatttgtagttttttggcaaataagcaattacttattaaaatatttagcgtagatttcgtcagcgccttcaataactttatcagtgtatttagccattggttcacggttgtagccagcatgtacgcccatcttttgcaatactaacttaattgatgggtaaataccgttattaagaagggcagtgataatgtcgttcttcttgtgttctaattcttgtgccttagcaatgtctccgttgttgtaagcagcaatttcttctttaaccattcttgcattaacgttgtaggttgatccgatacagccatcgacaccttcaattaaagcaggtaacaacatttcatcgaatcctgaaagaataagcttatcagggaagcgctcacgaagtctttcaagtaagtagaagtctgcattagtgtacttaacaccgataatctttggatttgagaataatttagcaaagttatccaatgaaagtgaaacacctgttaatgcagaaattgagtaaatcaataactttgcatctacatccttaacgatttcatcgtagtaatgcttaatttcgtcgaaggtaaagttatagtagaaaggagtaactgcagaaattgtcttgtaacccaattcagtaacgaacttagctaattctttagcttcttttaagtttgggccacccacttgagcgatcaagtcaacttgttggtcaacttcgtcccaagcaatttcgaagatcttcttcttttcttctaagccaagcataaagttttcaccagttgaaccgccaacgtataacccgtcaacaccttcaacatcgatatcgtgacgaatgatttcacgagtacctttttcatcaatattaccatcttcatcaaatgaaaccattaaggctgcataaactttttgcatttgtttgacctccgtttagtcaaaataaaataatatttttttaattactgtataactaatggcaaattcaaccaacacctgcagtatagaacatgaaaacgctttacgcaactctaaattgcgaaaataattttcagaaattgaacaaagcgtaggtgtatcaagagatacagagcacgaaaattattttctaaatttttatttgagaaaattgtttttaaatgatactatgaaagcgcttaatataagaacttgattatacaggaaggcgtgaaccaaatgagtaagaaatatttagcttttgatgttggcggaaccacgattaaatacggtattgtagatgagaatcttcagatttcagatagaggcaaagttgatacattacataataaggacggacatattttgaagtcacttattaaagttaccaaagagatgatacagaagtatcaattagatgggattggtgtgagtaccgccggtattgttggagacgatggaagcataatgtatgctggaccaactatttctgactatcaaggtactcccattaagaaagagctagagcggacatttaaaattcctgtcagtgtcgttaatgatgttagtgcggctttattaggggaaaaattagctggaagtgttaaaaatgctagtactatctattgtgttgcattaggaacaggaattggtggtgcattttgggcagatggacatttatttaatggatatcatcaaacgggtaattcaataggatatacattatttgatccaataacatcaactaactatgaacagcggtcatcaaccattgcattacaaaaagaattagaacccttaggtattgatcctattgaagcctttgcacgtgccaaaaaaggaagccttagagaaaagaaaattattgatgcttgggccttgcaagttgcagagggcttaagcagtgtattattacttcttgatccagaagtattagttattggtggtgctgtttccaagcagggagattatttaaaagatttgttggacgaaaaattgaatcagattttaccgccaaatctatgtaaaaccgtattaaagatggcttctttaggtaatgatgcacaactttatggaggtatttctagcatttttgaaaattaatttctagaaagcgcttgcaataaaattgttttcgtgtatgctagaggtgtattaactaatagcaaaattcaaccgtacttatgtgaggcaaatgctgagcataattgtacggtttttttaatcccgtttattgaagaaaagaggcaagtcatgaaagtttcagtgaatgcggcaatctttgttgatcgtttgaatagcggagagagtcaaattgattgcttagaggatgtttcaaatttgaaagataaaattgacaatatccaagttcgtggagaattctttaaagaaaacaccaaagacgacgaactcgaagcaatcaaagcattgtgtaaaaagaacagttggggattgtattattcagttcctgaacaatttttcattgatggacatgtcaataacagtttgaaagacaatgttgaaatggcaaaaaagcatcaattgaagcatttgaagtatttcgtaggtgacgttaaagatgttgaccaaaaggaaattgaggatgctgcgaagcttcttgaagatgctaacgttgatttgacattggaaaatctttctaatgaaacaggctatttaagtactgttcttaaaggtcttgaagcagtaaatcaatatcctaatattggcttcacttatgatgcaggtaattggtactgggttggtgaaaagcctgaagttgcctttaaagaattaaaagataaggttactaactatcatctaaaggatattaagaataaaaaaactgtgatgttaggtgaaggaactacagattgggaaccaatgattttaggacttgatcctcaaattccaatcttcctagaatatggcattgatgataacaagattgaacaagaacttgacaaggtcaatgctgttatagacatgcggtaggtgactttgatgacgtaccttgtacaactatttttgattctgctattaactaaaattgcggcacacttttcagttaaggcaaaaatgccaagtgtaattggagaattattagtcgggattttagttggaccagctattttaaattggattcagcccaccacattcattaattatttttctcaactaggtgtaatcgttttgatgttcattgctggcctagaaggagatttgaaattattaattaaatattgggctccagctttaactgtagctactttaggagtaatttttccaactggtacagcatatcttctgtgccatacggcttttggattttcagtaaaagcatctatatttatgggcttagttttaagcgcaacatctgtaagtattacggttcaagttctaaaagaaatgaatcgtttaaatactcgtgaaggtgcaattatctgtggtgctgctgttgctgatgatattatctgtgtcattttattaggaatttgctccagtatctacggtggtggtcaccatacatcaatcattaaaatgatcattccgatggtattattctttatcattgttttgcttattggtaagtatgttgtgccaaaattcttagatatttttagtgatcttaatgcttctgaaagtgatacagctggtgcgatgattctttgttttggtgcagctgccttagcagttgcaatgggaatgagcgatgttttaggcgcatattttgctggtttagcaatttcagaaactaattatgcagacagattatcaacaaaaattgagccaattggttatgcagttttcattcctgtgttctttgtaagtattggcttacagattagttttaatggcatgggtaaggacttattgtttattgccttactaataattatagccatcttgggtaaacaaattggttgtggtatcggagcaaagatgttccatcttaattggacagaagcaaatattgttggtgcaggtatggtttcaagaggagagatggcactagttgttgctaatgtagctcttcaatcacaattaatagatcaaaatcactatactgcaatgattgttgtcacagtaatcacaacattgattgcgcctattatattgaaacttttcataatgcgaacacaaagaaaagaagtaaaaatgaattaaataaaaggggagaaaaattatgtcgaaaacaggattcggtatgtggaacaggatcgtcttaatcgcatatttgctagcgatgttaggcgttggtgcttactttactaaacgggcaagtaaaagtacagattctttcttcaaagctgaaggtaaggtgcctgcttgggctgcaggatttagtatttgggctactactttaagtgcgatcacgttcatgtcaacaccagaacaagcttttttaactgactggggttattcgattgggacgttaacaatttatttaattattcctatattaattaaatggtatgtacctttcttcagaaaattacaggttactactgcttatgaatatctggaaaagcgttttggaccagtgatgcggtcactcggaagtttgctatttatgctttatcacattggtagagtagccattgttatttacttaccaattttggctattacttccgtttcaaatattaatccaatattgattgctgttttagttggtgcaatgtgtattatttatgcattcctcggcggtattgaaggtgttatttggacagatgttattcaaggtttccttctccttggtggtgctttattaatttgtattttagcagtcgtatatactggtggacctgggaagatcgcacaagttgctgtagataattctaaattcttatctgctaaagattggaatcctaacaatttagctatgttcattccagtaatctttgctggtcaattcttcaatagtatgtatcaatataccgctagtcaagatgttgttcagcgttatcagactactccaagtattaaagcaactgccaagtcactttggacaaacggttggttagcaattgtaactatttttgtattctttggtatgggtactttcttgtattgttattaccacacgatgggaagtttaccaaaaggttttaacactagtgctattgttccatactttgtaattaccaagattccagcaggtttagccggtttaattattgcaggtatcttcgctgctgctcagtcaactattgcttcaagtttgaatgctatttcttcatgtttcgtaactgacttcaagcaaagatattttgataagaaatggaagatgaatgatgttacactagctcgtatcattattgtcatcgccggtgtatttagtttaggaattgctatttacttgttgatgggtaatgcatctcaaacttggaatatcttcctttcaattactggtttgtttggtgttccagttgctggtatttttgctgctggtatctttactaagtcagccaaccgtgttagtgctgtctggggcgtattaattagtgctgctcttacttattggtgtcaagtaatgggtgttgcaacattggtacaaccaattgtagccttcattagttcattcgtaattgcttggttaattggtttggttactccaaaatatgcacatgatatcacaggtttaactgctaaaactatcaatgagaaggttaaggattagttgaaaaaggtgaaactataatgaaagattcaatgtccttaaaagatatggagtcatatcgaggtagattagaagttccagatgattttgatagtttttggagcaaagaaatcaaaaagatagaagcaaagccatttaaattaattaaaagaaattttggcgataatattaaaaacgttgttttttatgatttgttcttcaaaggtactgataacggaatagttcatgctaaatgcatttttccagcacatgaaaaaaatattccagtagttttctatttccatggttacatgggacaagctctcgattgggttgatttcatgcaatatgctgcgataggtgtaggcgttgttgcaatggatgttagaggccaacaagggcagtcggttgataacggtacttatgctggaaataccgttttaggccacataattcgtggagcagtggatggaccagatcatctgttttataaaaatgtatatctagatgtatacacgttaattgaaacagtcgcggatatgtcacgtgtagacaaggaacatctatattcttggggtggatctcaaggtggtgctttatctttgattgctgcggcattaaatccacgtattaaaatgtgctactcaatacccgtttctttctgatttcaagcatgtactagaaatgggtgatcgaggattgccatatgatgagttatttaggtattttaagttttatgatccatttcataagacggaagacaagttgatgcgtactctgtcttatatcgatgttaaaaactttgctcatagaataaagtgtccagttttaatgtttacaggacttgaagatgatacttgttttccagcaacgcagtttgcaattttcaataggatagaaagccctaaaaaacacatgctgttaccagaatatggtcatgaagcaatgttttattatgttgatagtgccgcatttaactggctatttgatactaagttcccagaaaatccaccggacactagtagtaatgctttagaataaggtaaatttttaggagataaaaatgaaaaaagaagagtttattcaaaaagttcataatggattaattatttcttgtcaggctttacctggcgagccactttacaccgaagagggtggcataatgcctctgatggctaaagccgctaaagaagcgggtgcagttggtttgagagctaactccattagagatattaagcaaattaaggaagtagttcctgacctgccaatgattggtattattaagaaagaatatccacctgagaagccatttattaccgctactattaaggaagtagatgaattagctaaaacagatgtcgaagtaattgcacttgattgtacattgcgcccacgtcatgatggtaaaactgttgcagaatttattgatgaaattaagactaaatatcctgaccgtttattaatggctgatacttctaactttgaagaagcaaagaatgcttatgatgctggtgttgactttgttggtaccactttgtcaggctacactgaagaaagtcctgtttcagatcatccagattatgatttagttaaagctttggttgatgctggaatgccagttattgctgaaggaaaaatccacagtccagaacaattaaagaaaatgattgatattggaccagccggaattgttattggtggtgcaattacaagaccattgcaaattgctaagacatttacgagtgtttttgaataaatgatcttctgattagttataaatttcccctctcccaaaacaagctacgtttgtaaaaggcagacgtagcttgtttatttttggttataaagtcgaatttttatagaaaaagcgaggtataaaatgtcatattttattcatgcaaagaagttttatttagatcatggtgttgaagaacgaggatacttagaaattcaagataatggacaatttggattttattattctgaagatgaaaaaccaaaaagtgctgcaattttagatttcaagaatttctgaaaaacttcttcaatatggtgtaacaagttggatgccgaccacagtaactacttcatctgagaaattagatgaaatttgtaaaacgtttgctgcacataaagggcaggaaaaaggcgcaaagatattaggtattcactttgaaggctcatacttcactaaagaacatggcggtgcagaaaatcctgagtttatggaggatccttcaattgaagaatttgataagtggtacagagattctgatgggatgctgagaaagatatcactagcaccagaacgaaaaaatgtcccacaatttgtcagacatatcgttaaaaaaggcgtagttgcttctttaggacatactagtgcaacatatgaagaagcacgaaaagcccttgacgcaggagctacaatgtttaatcatacgtttaatggtatgaacttattatctcagcatacacctaatattattggctgtgcattaacagctgacgatgtatttgatgaaatgatagctgatggtcaccatataaagccgatcattttgcagatgttgtttgatttaaagggacctaatcatattgtattaatgactgattgcttacgtactggtgggatgcctgatggtgaatatgtgcttagtggtatgaaagtaacagttaggaatcacattgcattgttagaaaatggtaaattagctggcagcacattgactttggataaagcagtaagaaacttagtaaattgggaagtatgtaagccatatgaggcaattaagatggcaacatatactcctgcacgtagtctaaatgaaaactgtggttgtatcctgccagatagggatgctgattttaatgtgctagatagtaatcttaatgttctaaagacttttgttaatgggaaagaaaagtatagcgtaaagtaaaaatattattatagtgtgaaaaaggcataggttgtgatatgaacctacgccttttcttatagttaatgtcttctttatctacttgaataatgattttctaacaggaaattgtaaagaatttgagactgtaaaatagtttgtgtaaggatgaataattccttaaatttatttcttaaaacattagaaaaaggagttcctttctcgtatgattggtttgaacaaaaaaacacatacagaaagaagaactccttcatgaatgattttaccaaaaatatagcacaagctctattcaatcaagacaaaataaacgatttattgcgcaaagagctacaacaggctgttaataacttgctagaagctgaattgactgcctttctgggctatgatccctatgccagaaatggctggaatactggcaattctagaaatggtgcttatttccgcaaggttgatacccagtttggaccaattgaagtgcaagtgcctcgagaccgcaacggtcagtttcatcagcacacgctgcctgactacaagcagcactctgatgttttggaaagcacgattatcaagctctactccaaaggcgtaactaccagagaaatcgctgacttgattgagaaaatgtatggcagtcattatagtccagctcaagtatcaaatatttccaagcagatgctccccaaggttgaggcttatcacaagcgcaagctaagcgacaagtttttctgtgtctatttggatgcgacataccttcctttgcgccgagaaacgtttgagcgtgaagcagtatatattgccattggcattaaacctaatggacataaggaagtcattgattactgcattgctcctagtgagaacattgaagtctggacagagatgcttcaaaacatgaagtccagaggcttgaagcaagttgaactctttctttctgatggtgttgttggcatgaaaacagccttggccaggacttatcctaaagctcattttcaacgctgcttggttcatgtcatgcgcaatatctgtgctaaagtccgggtggatgaccgcgaaaagatcatgaacgaattcaagcagatacatcaacagacaagccaaaaagaagctgcagctgtcttgcatgaattttatgcaaaatggaataaagcttatagccatgttatcaaaggtttgagggaaattgagcccgatctgctggtcttctacaattatcccaaacaaatcagagcttcaatttattcaaccaatatgattgaatcctttaacaacgtcatcaagcgtaaagctaagcctaaggcagaatttccaactgaacagtcgcttgatgcatttattggcatccaggcaatgagctacaatgaccgctatttcaaccgaattcataaaggctttggtcaggttcaggataccttagaatcttattttgaataaatgattaaaaaatcaatttacgagaaagaactatttacacaaaagatttgacagtttcgattgttactactggtgccggcacaccaaaaccatatatgtctgatttaaaagctgctggaattaaggtaatgccggttattcctaatgttaagattgccaagaaaatggaagaaatgggtgctgatgcagttatcgttgaaggtatggaagccggcggtcacattggtgggactacttcaatggtattatggccacaaattgctgacgcaattaatattccattaatcgctgctggcggtatcggtgacggtcgtggtgttgttgaagcatttgttgctggtgctgaaggtgtacaatgtggtacaatcttttcaattgctaaagaaagcccagtaggtgataactggcgtaaagctgtcatcgatgctactgatactggtactgctgttgttggctctactatcaagggtggtgctactcgtggtattgctaatgaggaagctggcaagttgtttgaacttgaaaagacaggcgtatcaagagatgaatttaattcagcattgaacaagggactatacgttggtgtaagagaagatgaccctgataagagtttctttatggctggtgaagttgctggtctaattaaagaatctaagcctgctgcagaaattgttaaagatttaatggatgatgctcaaaaagtattgaataaaaacatcgaaatcatgtaatttaaagccattttatggctgtggaattaatacataaaatatttataatcaagcattaaataaaggcgaatgtaatttcgccttttttattattattataagttataaccaatagttatgataatgctaaaaattaatgatttcacaatgctagatgtaagcggtaccttataagtgtcaaggaattaaatgattccaaaattctactaatttgaaacatactctcatacatattattaaactcatctggtttccaattcagtagaaacgtagttagttagatttaaacataggaggataaatctatgtctgttaaagttattgacagtaaaactgcagcagaattggtcccagataacgctagtgtagctcttgatggctgccttggcactgatgtcgctgaagaaattcttgaaatgatgaaaaatagataccaagaaactggacatccaaaggatttggatgtttggtatggatgtggtatcggtgataacaaaggctcagccgttgaaaactttgctgaaaaaggaatgctccgtcgagtagttggtgggcttgggtcattagcgccaaagcttgcaccaatggttgcggataatgattttgaagcctttaatttcccacaaggtacaatttcacaattgtttagagatgcagctgctcaccgtccagttctagtaactcatactggattaggaactttcgttgacccagaaaatgatggtggtcgtttaaatgaagctgcaaagaattctactttggtaaatagaattaagattcatggaaaagattaattagcttatgaaacaccaaagccagatgtatcaattttccgtggtacttatgctgatgaaaacggcaatatcacatttgatgatgagcctttaaccatggatgttactgctgttgctatggcagctcacaacaatggtggtaaggtaattgttcaagttaagcgtgttgttaaggctggtagtcttgatccaaaggccgtcagagttcctggcgttttagttgattatgtagttccgactgataatcctgaaatgactaaacagactaccgattacatttacaatccagatattattaagtctaatattgtaaaagacgttaagcaaatggacttacctcttgataaaaagaaggttattgctagaagagctgcattcttattcaatcctgataccgaccattgtgtaaacttcggtattggtcaatatccaatgtattgcgcaatggttatgaaagaggaaggattatctgacaatatcgtaactactgttgaagcaggtacattcggtggcacttcattaggtggtggtagttttggtacagctattgctcctcaagctactattgatgaaccttacatgttcgatttctacaacggtggtggacttgacgcaacttacttaggtttagctgaagctgaccaatatggtaacttaaatgtttcaaaatttggtcctaagattgccggtactggtggtttcgttgatattactcaatatacacctaagattgtcttcactggtacgttcactgcagctggacttaaggaagaaatcaaggacggtaagttaaacattatccaagaaggtaaagtaaagaaatttgtaaagcatgttcaacaaattaccttctcaggtaaagtcgcatatgacagtaatcaagaagtttggtatgtaactgaaagagccgtatttaagctagttaaaggcggtattgaattactggaaattgcgccaggcattgatttacaaaaagatattcttgatcaaatggaatttaagccaattattagtgacaatttgcaggagatggatccgagaatttttcaagagccagtcatgaatatcaaaaacgataagaaatagttaagtgttttaattcatagggggatgcaaagttggatattaaccaaatccgttatttgctcacaatagcagataatgactttaacttaactcgtagtgctgaagtcctccatatttctcaacccgctattagtaaagcgattaaagatatggaatttaagcaacaagtaaaaatctttaatcggcgaaagggtaaaatcgttggattgacacgttacggtataactttagttaaggaatctaaaaaagtgtatgaacaatatattgaaatggtttcgaaactaaatgaattatcagaaaatagtaacggaactgttagattaggtattgcaccagttattatatcgaccgtgttcaatgatgcgttaatagcctttattaaccaaaatccaggcattcaactaaaaattatcgagcgtggagcttatgaattacaaaggatgttgattttaggtgatattgatctagctgtgattgtttctccagcgactgttgaaggtatttatgaggatttaatatacgaaaatacagttagggtttggtttaataaagaacatcgttttaatgattttactggtccgattccattctctgaaatagaaaaagaaaagattgttactctgacagatgattttatggttacctttcaattgaacaaaagatttaaaggtgataggctgaaacctaattattttcttcaaacacaatcatgggatttgattttaaatttagttcaacgtgataagaatttaattggtattgtggctgctccaataggaaagaattatagtgatcatgcaataaagaatgctgaaattacacctgaatttccttggaagatatcgatttgtcatactatgaattccactgaagatccaacagtagaatacgctaaaaattggtttttgaaatacttttctaaatataaaaagatatcaattgattaaaaattaaggaagaatcattatgaaagctatatttccaggtagctttgatccaataactaatggtcacttagatatcattagtcgtgcttcaaaattatttgataagttagtcgttgttgtttcaaataatacctccaaaaatggtatgttttctcctcaacaaagatatcaatttgttaaagacgctgtgtctgtttatcctaatgtttccgtgagccttgttcaaagtgatttaactgttaatttggttcatgaattaaatgctgatgttattgttcgtgatgtgagaaataatgaggactttgtttatgaacaacaaatagcattaatgactaagaaaatggaccccaatatagaaactttgattctattttcaaaccctgaatgttcatacatatcttctagtattgtaagagaaattatgctatttggaggcgatatttcagatgctgttcctgcttgtgtaaatcgtgctctaataagaatgaaaaatcaacatatggcaaggagcgtatcattatgaagactagaaaagaaattaccaatttaacgatcacagctgtatttattgcattgctttttatccagacatttgttccgaatgttgggtatgtaagaattcttcctagtcttcctgcaattactactattccattaaccattgctgtttatgggactttaatgggaccgaaatggggattgggttttggattagtttggggaattactcgtttagttgtggcctatacacaaccaggggatatggtcagcttgcttttgttccaaaatccagtaatctctcttgttcctagtgttctagcaggattctttcctggattaattagtcagaagtttaaagatagggatgcacatattcaaaagatagggtatatgctcagtggagcagttgcttcgctgacgaacactattcttgtaattttacttaccgatttaatgtttatgtctaattcaagcaccttaacaagttacttagggcatttttgtcagtcaactccattgttggtaattctagtcactgctctaggtttcaacggcttggtagaagcgatatttaatgcaattcttgtccctataattgttacacctcttaatttggtacttaaaagagcgtaaatgatgaataattttattactgttgaccgtaatcactggactaaattaaactctaagattgagcttccttcttatgaactattaaaaagttttattgatcaaaataagttacaggttacagtcaatgaacttcaagaagtatatatcctattagttcaatatatattgatttgcgttcaaaataagaaaatgttctctaaattaaagacaaattacattaagagtgctgatttaaaccagccatttatcctgggaattactggatcagttgctgcaggaaagtcaacgactgctaaagtaatagagactcttattagtcaattttactctgatttagatgttcaatcattgacgactgatggctttatttatcccaacaaagtactggagcaaaagaatttaatgtcacgcaaaggctttcctgaaagttacaatgtatcactattaaatgattttctttctcaagtaagtgatggggtagaggaagtttcctatcctgtatactcacatgagctttcagacatagttcctggtaaatatcgtagcattaccaatccagatattttgattttagaaggaatcgatattttgcaaattcctgaaaatgaagagaagattatcagtgattatatagatctatccatctatattgatgccagtgaaaacttattagaggaatggttcttaactcgctttaaatgtttgctagatattaataaagataatcctaataatttcttttatcattgggctcatattcctttagatgaatcaattgattatgcaaaaaaggtttggcggacagttaatttagttaatctacgtgactatattgtaccaaccaaggaaagggctaatatcattctttataaagatgtaggtcacagagtaacatcaataaaaattcgaaaatattagaagtatctctttctaagcagttcatgagaaatcatggactgcttttggtttaatgtccgtgatctcatcggggtgcaaaacaacatatacgaactagatccacgatagagtataattaggttgaaaacttaaggcagaatagttgtagagtggagggaaaaatgacaaaatatgtggtaaatagtgaattaagcgatactgaatggcaaattgaaaattcaactgccagatatcgctttatagctgacaatggtgataaaactggaggccctgatcctgttgaatatttaactggggcattaaattcttgtatgtctatttcagctggattgcttattaaggcgcaccatctggacgttcaaaattttaagattaatgcggaagcgaataccgagagattatcacacggaatgccagatgttgatacgataactatcaaaatatcatttgatagtcctatgtctcatgaagatcaagataaatttgttaaagatattttaagagtatctactgtctatcaaacgttgaaaaaagcgatcaagattagtattgagtggaattagcctaagttaaaatgactagtacgaaagaagcactgaagctaaagacaaataattctaaatacaatgcagtagtaaggccatactgcaatatcaattaataaagcaaccagtgtagataaaagatctatactggttgcttttgtttgatttaagttagtgacagtatcattaagttaagacattgacaaatttgacgcttttggaaccgaatcattttgattcggttctttttctttttacaataaaataaagagtgagcagaagtctatatctgcttactcttttgtctcttatcaatttttttataaaaagagcgtagttctcatgaaatcccttcacacaaacattttaaaactgatgaatcagattatcgataaaattcaaaattcattattgacaaaacaataaaataagattagcataatattaaaattatttaagaaaggagctacatatcatgttagaatcacaaaattcagcaacagtagaattacgacgccgccaccaaaatgatggtttattttgtgatcctaaattatggtgtgcggcgaattttgtttaaaaataattaattaagttgattactaagcaaggttcacattcctaattgggatgtggacctttttttgttacagaaaagagaaaaaactatgaagtcaattaaattatttggttcaactggtctacttattggtgctgctttaactttagtagcatgtggtcaaagcaatacaaatgcagcaaaaagtgcaaagaaatttcctgaacaaactgtacaaaaaactgcacagaaaggtggcactttaaactacgcaatcgaaacagatacgccttttaaaggtatttttgatagtcaattatcagttgatcaagttgattctgatgtcatgcaatttggtaatgaggggttattcgatactgataattcatatcaaatacgcgtggtgctagttaaatcgttttagttaataaaaaagtccaatcggattagactcaagttgtaagtaaattaaatagaaaagagtctgatctaattgaactacctcaagcttaatcgtttctctcaccatttacaagttagttttagtcgtttaaatgtaatttgtcgttcactatataatctttatgcgcctgataagcttacgcatcgaaaaaacattgatcaaacaaagctttccgacagctccatcttagcgatgctcatttggcaaactgaaattggaattgaatcccaaagaagattctgtaaattttttgttggcttatctcattctcgctttaatcgtcgagccaagatgcttttgcctttaattcgctgcatccgtcaagcttggaatcaagaggtaaaggttgctggagaatttttaattattgacagttttcctgttccagtttgtcagcctgttcgtaattatcgtgttaagatcttccgtgacatagccgatattggctataaagcaaccaagaaagtctattattatggtttcaaggtgcacgcgctagtaagcgatgatggctatttgcttgactacgcagtcactaaagcatcagtgcatgatgccaaagaaacgacagaattgatgattaatgctcatccaattaaccattatcttttaggcgatgaaggctacttaggaaaagacttagctgccgagttaaaaggtatgggctatgtcctttggacaccatatcgaaaaaacatgaaaggtgctaaaaaacataataatcatcaactgatggcaattagaagaacaattgaaagcgacttttctttgctcagttactataacgctgaaaataaccgagcaaggagcttagctggctttcagcagcggctagaaatagccattttagcttataatatggcatattgcctagaacgatttaactagcaccacgcgtatatcaaattaataataaaggacctgctacttttaaacttgataaaaatgcaaagacaattactattacggtaaaaaaaggtgttaaatggtcggatggtaagcaagttgtagctaaagacttagaatatccatatgaaatgactgccaacaaagcaactaatagtttacggtattcagattctttagaaaatattgttggtatgaaagcttatcacaatggaaaagcaaaaactatttctggtattcaatttcctaatggtgaaaatggcagaaccattgtcattcattttctttcaatgaagcctggtatgttgcaatcaggtaatgattactttattgaaactgctgctccgtatcattatctaaagaatattcctttcagtaaattggtttcatcagatcaaattagaaaaaatcctatcttttttggcccttataaagttagcaaggtagttagaggacaatctgtaacttaggttccaaataaatattactggagaggtacaccaaaattaagcaaaattgttgctcaggtagtttctactaattccgcatcccaagctattaagagtcataagtttgatatagccgatgtggtaaattcacaatggcaagcagttaaagatgcgaaagatacaaaattcattgctaaaattcctcttgcttacagctatctcggcttcaaagtgggtaaatggcaagatggtaagaatgttatgaatcctaattctaagatgaatagcaaatctttacggcaagcaattgcttatgcaatgaatattaatcaagttgaaaagagatacacgcaaggtttgacttttagagtgccaaccttaattcctgaacaatttggtgattactttgataaaaattctaaaggctatccttacaacttaaagaaagcaagtgaattgttagataaggcgggatataagaagaaaggcaaatggagagttcaacctaacggaaaaccattgagcattcatttagcagctatgagtgggtccgccgttcaagaaccaattattcaaaactacatccaacaatggagaaagattggacttcatgtgagtttaactggaaacagattaatggaattcaattctttctatgataagttagaccaagacgataaaaatatagacatgtttattgcttcctggtcattgtctagtgaaccatcacctagaggaatctatagtgaaactagtgcaatgaatgactcaagatttgtgacaaaagagaacaacaaattactcaatgaaattgattcgtctaaggcgtttaatcatgcatatcgggttaaggcctttcataagtggcagcaatatatgaatgatgaagcttatattgtgccaatgactaattcttactccattaaggctgtgaatagcaagctggttaactattcacttaaaccggctgaatcaaattcgatttggtataaggtgggatttgctaaataatctttcttaagaaaaattcccttccagatgattgaaaacgatcaagattttcttttttgagaatcttggtagttttttatgatttgtaattttataaatgattaggcagtttgaagtctatatgtgtatatttaaattgtataaaatctccttaaatgctgatataacaaggattatttaatatagctttttagcctaatgaagataactatggttatatttatataatatattacgcatggtgctagttaaatcgttttagttaataaaaaagtccaatcttgttagactcgacttgtaaatagtaataatagaaaagagtctgatctgattgaactgccttaagcttaagcgttttagccaccatttacaagttagttttaaagatttagtgataatttgtcggcactggtatcgtttgtatgcaccggctgagtttactcatcggcgaaatattgatcaaattaaaactacggacagtctgattttggctttacttatctggcaagctaagacaggaattgaatcacaaagaagattctgtgaatgtttcaattgtttatcacactcacgttttaatcggcgttcacgtcagctattgcaattgatttatcagatacggcaagaaatgaataaaaaggttgacctgaatggacatttcttgatcattgacagctttccggtacctgtttgccaaccaattcgcaactatcgtgctaaaatttttcgcggttatgccaacattggttataaggccaccaagaaaatttacttctatggtttcaaagttcatgccattgttagcgatgacggttacattcttgattatgtcgtaacaaaagcatcagttcatgatgccaaggagacagttgaactgctggaaaatgcccatccatctaattactatcttcttggcgacgaaggctatttaggcaaagaactgcatcaacagctaaaacaaatgggttatgaactttggacaccatatcgtaaaaatatgacaggagctaaaaagcacaatgatcatcaattgatggctattcgcagaacaattgaaagcgacttttcgcttctgacctattataatgccgagaacaatcgagcacgtagtctgataggctttcaaagccggttggaaattgcaattttagcttataatttggcttattgtctagaaagatttaactagcaccacgcgtaatatattatatattttagagcagaagtaaaaaaattcgaaattgtttattaattatctgaaaattgaaagcaccaaaatcaagctcaagtcctgtcactattgagctttcttagacgtaattagtttttatatgatctgtttcagtgcaatttgtatgaatcgtggcagttggttaataaagtcattgattacttcatctatcttttcaaaactattctgtttaagctcttttaattctgaaattaagtagaccaatgcatctacgaatctaatatcaggtaaggattcgttcattagatagaataaatctccgattgtcttatcatctgtattttgtctttcctgccaggtcaatagatcataagttattgctgtaactgcgatatagccacattggccatcatagctttgaacttgagatttatctaaagcaagatattgcttagacgtcttaaaatatgtttcaatttgccatctacgaccataaagttggatgatttcttcagagctaagctttgtctgagtagtagctaaaaccaaatacttgttcttgtttccacggttggagacaaagacgagctttaataaaaagctatgtccatgatattgagcctcaactatgcttgaataaagataatgtttctttttacggatgtttgaagcagccaaacgatcatacaagtctttaacgctatagcggcaatggcgataaatgtaataaatctttgaactcttcttgatcatgccaagtccatctaaaccgatcttctttaaaatccaaaacattcttggagaagaaaaccaagaatcgaataagacgtatttagcttctactcctaatcgtaaggcttgtctaatcaactctacagttacatcattcatctttctctgagcttgatttctccttttaccagaaattgaacgttcatcagcagtaatgggagcagctccaatcatatttttcttggttttggttgacatcaaggcaaagttaaccggcaagaaggtattgccatcgctccagcctaaagttaaaccacgatatccgttcaaatactcatgcttgtcatggtcatagactttagctagcaattcggtctttttagaaaaagaccgagccatcagcgtatcgtcaacgataaaagcaagtcggcgtcttttatcgataaatggttttaagcagccaatgagccgggctgcaatcaagcataatagtttttgcagttgattcttccatcgttaagtacattgcgagcagttctaacggaaaaacgtttgtcatccttagctctgaataaagaaagccgagcaaaatgtactgacatcagccaagagataatcatggttaatgaaacggtggatttacgcttaaaattgacttgtttagttaacttagctagaccaattagattaataaatgaagaaattaaggatttagtatcgttttctgtgtcgatttgttctatactgttcattgcgcaggatctcctttactttttaggtcgacacttaaagtataacgcagagagatcctgcgtttttatttttgataagaaaaagccaagaggcgcggggaaagagcgttaatcttagctttcaagtttcagttaattatatagaaatggttatttaatttgcttaacctaatgctatcgcatttgaaagagctttcaatatcttttaagatgttatctaggtttgttattaaatatttacgcatatagacttctttatttaacctgctaccctattaagtgaagagacttataacgaagtttaagaaaccgactacttcttaaataaatgagtttaaatttaaagcttgaaaataataaggacttaaaaatttcgagctttcataaataataaataggggattaggaaaatgaaaaagagcattaaacttttatcaacaattagcattgccgttgctttagcaggtggtgcaattactgcagttaacaatcaagaaacttcaaatgttgatgctgcatcaataacattaccttctggttacaccaaggatgccgttatcaaatggaaccaaactggtaaggccagcaaggctttggtaaatgcctcaattaagggtatgaaagaaaataatgatagtgatgctggttcagacaacaccttggttaatgtaactaagttaactgatagtcaaaaagttgaattaagcaactacactttggaattgattaattctgctcgtaatcaacttggcaagcaatcttggacttacaagcgcggtgcattaaattttgctgaccgtgtagctaatcaatattactcaaacaacaagtcttgctgggatcctgatcactatgttactggtattgaacgtgcagccaaggcttcaggtcttaactcacgtgttggtcaagtttacgaagatgaagcaggtttgccaatttcttcagaatttaacaccaactaccgtacaatgtcggctttgaagagccaaatctacttcaacgttaagcagatgctcttcggtggctttgctggctcaagtagccaaatgggcgatgcttctaagtatactgaatgggaacacgctggcgacttgcttggctgccgcactaagcgctacatccaaaactacaagaaattcaataattaatctgacgttgtagtttgaaactaaaaaagtttcctaatccaagagttcaaacggtttagtcacctgtctgggctctttttaatttgcttaagaatattttgaataatatgattaaatttctattatgtgagattttttcaaaatgtggttgactgtaaacaacaaatagtaaagaatacagttaatgaaaagcgaggaagaacttcataagttagtggaaaaggttattgatgattttgctgcttgggatgaagatgagcgctataaggagccagaaaaagaactacgtcagctgttggaagatagtaaggtcttgggctttataatgtacactagattgagtgatattctgggttggcatcatcgtatgttgactgaagccaaggaagagagaaccttaacagctaaggaggaagtattactgaatgacatggatgcagttcatgatttgatggaacgaaccatggatgaagagaatggtaggttgtagaaagcattaaaattacagaaaaataaaaccacattgctcaaaaattgaagtgagtaatgtggttttttacgttgtaattattgtagtagccaatcaataagattgattttttgaatcccgtcgtagttggctgtgggattgatagtatcaagggttagtaaaagtttggaatgaactccaaacaaatgacatttattgctgctttttggagtcaactccaaaaagctgactttatcgttttgatggaattgaataggggcaagggagatattgtaaaagcgagtgtcgagtaaatagtgaactgagtgtctgggaaaaaactaagtctcagatcatgaaaaaagaacgttgaatttttgtttcaacgctctttttgtatacttttagctccagccttgatattattaaatcatcacaaaataaaaaaggtggaaactaacatgtacaagaattatatcacaggtcaaactgctttaacacttaatctagattttgccattccggccaatcatttggctaatgtcatcagctggtttgtagattcaattccagaagatgttttagtaggcaagactgctaaaacgggccgcccagcctatcatccagccatgatgctcaaaatactgctttttgcttactccagaagagttttttctggcagaaagattgagttgatgctggaagaaaatctgccaatgatgatcttggctgaccagcaaaagatttcatatcatactatcaataattttagatcaagcagccatgccaatgaactgattaaaaagagctttatctacttcactaacctgttagaagatgaaggcttaatcaatgaaggtgctgcttttatcgatggtactaagattgaagctgatgctaaccgctatacatttgtctggcgcaaagcggttgaaaagtatcatgaaaagctgaaaggccaggcagttgaactttatgatgaattgattactaaagaagtagtcaaagaaatggaaaaagaaaaagttcaaactagtcaggggctaaaggaattagctcaagaaactgaagcagaaattaacaagctgactaaagagattgagcaggaaaacaaagccattcctggcggttcacctcgaaaagccaagcgacgtggactaaaaaagattctgcaccggctaagaaaagattatgtgccaagaatgcaaaaatatgaagaagccgaagagatctttgccggacgcaacagttattccaaaacagatcatgacgccacctttatgcatatgaaggaagaccacatgaaaaatggtcaattaaagcctggctacaatattcaagcagtcacgaccgatcaatatgtagttgattatgccatctttcctaatccgacagatttcaaaactttggagccggttttggatcaaatgaccgtgttggacaagtttgacaaaatcgtcgccgatgctggctatggcagtgaatacaattattcgatgctggaggaaaaatatccagacaagaagtactttattccctacactatgtatgaaaaagaacagaccagaaagtataagaatgatccaactaagctaatcaactggtactacaatgaaaaagatgattattacattgatcatcatggcgtcagattcaatttcaaatattacagccagcgtaaggatcgttctactggtcaggtccgtgattttaaggtttatgaggcagacgagttccagctaacgccagaattggaacaattggctaaaacagctagcggccgccagcgccaagttcgctataatcctaactggcaatatttaaaagaaaaagcaaaagaagttctccaaagcgaagaaggcagacacatctatggcatgagaaaatatgatgtagagccagttttcggacatttgaagaacgtatttggcatgcgcagaacgcacctgcgaggtaaagagaaggtcgaaaccgatatcggaattgcctttatgatgatgaatttgaacaaatattgtcaaagaaggtggctgaagggccgatttttattgttaaaaattttaaagagaacaaaaaaacgatcaagattcttaaaaaaggaaatcttgatcgtttttattcatctggaagctagttttttcccagacactttttctacgtaaagtcaagcataataagaagtttgacttcattttttgtttaaatttcaacttaaacatcttttagtgtcgatttatttttttagttagacacgacaaataagcccagatccatatctgatttttgggcttagcgttataatgtacttgatcaattaattacgactaaagtctttttgattatgtgtggctacgttgtaatcatatggttgatcattgataatcagggcataaatggttctgattagtttatgaattgaagcaatagctatctttttgaaccctttggtttgagaggatagctttttgctttcataataatctgctatatgacacggatttgtcttagctgcattatcaatttgtccaatagctcgataaagcaacttacgtgcgactgcattgccatgtttagtaatacttaaattagagtccatttctcctgactgatatctgcctggatcaattccgataaaagcattgattttattaggattactaaatctgcgtaaatctcctaactctgctaaaactctgacagcagtggtctgtgcaaagcctggaatgctttctaggttttctaaatcatgattaggcaaagacttcgctaacttaaccattcttgcgattaaattttctctttgatcacttaaattaagcaatctgtgtgcataatactgcacttgctcgacttctatgctagagcaagatacaactggataagcttgataagctaattcaattaatttatctgcagtccttagagcgtgtttaaaagcaatcccctttaagctcattaaccagttaataagctgttttttatcttctcttcttactaagtcacaatgaggatatcgcacaactatttgccagtaatttttacctttagcagaagaaaatagattttcaatttcaggaaaagtcgattgtagagcttggtaaagtcgatttttagccattactaagtcagctgttaactggtcatagaagcggctcaaagcattaagctgcttataagtttgagattgaagttgattaattggatgatgatatagtctttgaattaaggctaaatgataagcatcagttttatcagtcttattatgacgtagtcccatatccatttcttttttagctttaagaggattaagaattacataatcatagccatagtcttccagaaaagattgcagtgtacgtgaataaacaccggtagcttcaaaaataatttgcggatgtttagaaaaagcggttaattcatgaagcaattgaataaaaccaggacgattattagtaatggttagttcatttttgctttcaccaattagttcacaaacagtagaagtagacttgcttacatcaattccaaaagtaacttgcataataaaaacctccaaaacttagtagtaaaacgtatttacttaagaaatcagatctaattttctaaactcgacatctagtgtccacattcttcgaagagactattgaaaacttaagtaaaactgccagtttattatgcgacatcaagtgtctaaagacctcagggcatatcgttttactactactttaattctacaaaagaataaaaatagtgaatcaattatcccgtcggataactaattcactatttagcttagaatgtttactatgtctaaatttaataaagaacaaaaaatagaaatttatcataaatggaaagatgaaaatatctcaatcagtcaattggctaaagcgtacagaatgaatctagctaatttagactatatgcttagattaattgatatgcatggaatagaaattttaactactaaaaaccaaagctattccaaagagtttaagcagcgaactattgaacaagcaatctttggcaataaaccatacttacagctgcctttggaactggggtttaaaagtattggcatgcttaacaattggattagagaatataagaaaaacgggtataatgtcattatcaaacagaaaggacgccctgcccgtgaccaaagaaaagcagaaatctcgcaaggaactggagaaagagatccagcagctgaaagaagaaaacttgcgattgcgtattgtgaacgaatacgtaaaaaaactaagtgccttggatcaagaagatcagaagaaatagctagggtgattacggatctaaggcaagaattcaaagttagtttaaattatgtattagctgcgattgcagagcaccctgagctacctataattgccagaagctcatactacaagattatcaaacgacagcccgtcaagcctaaacggtcaaagcttattgctagaatccatgagatttttaatcatcatcaaggccgctatggatatcgcagagtagctttgcagttaatcagagagggctggaaagttacggagaaaaccgttcgctattggatgcataaattaggtcttaaaggcatcaggcgcaataagcgcaaatattcaagctataaaggtactattggcaaaatagctccaaatttaattcatcgtgatttcttcgcagccctgcctaacacaaaatggtatactgatatcactgaatttcatcttaataatgaaaagctttatttatcgcctattctagacggctgcggtggcgatatagtttcttatactatctccaaacatccagatatagatttagtaatgacaatgcttgacaaggcttttgccaaagaaacagctcttaataactgcatttttgatactgatcagggctgtcagtatcaaagccctcgttatcagcgagctttaaaactccatggtattactcaaagcatgtccagaaagggcaactccatggatgatgggctaatggagaacttctttggcctgctcaaaactgaaatgttctatgatcaagaatacaagtatcataatcttcaagaattaactcaagcaatcgaggaatatatcgaatactataacaacgaaaggataaagagcagattaaaaggcttaaccccgaaagagtatcgaagtcaagcctctattaatccaatattttaattgtctactttttacgtctcagtacatttttacattaattactattatttttcttcttaattagttaatttaaaaagttctggtcaaaacctgacacctttgacacttttcctctcaacaccttgatactactagctttatccatcatatctccattgacaccaaaacaattcaaaagctacccaatgcttgatataacaataatctgctagtgtcaacttaaccaacaccagaccgacaccatttgagttaataactgacacttttcaaatttcaagattcggtgtcaacaacggtgtcgcacatcgactaaaatgtgtcagctaaaccgacaccaaattttaacttggctatgtagattctcaaccattcgcactatattaaatgcaagcctgttcaaaaacttttagctttttgaatgaacgtgctgggcctacaacatcaagcttaaatgatgttcagaaacttatggtcaaaaaggatggattgaaatgacggaatatggctatgctagggtgtctacaaagggacaagaactagcagatcaaattaatcaattgcaaactgctgggatcagtgaggattgcattttctccgaaaaatttactggaactacaactgaccgaccacaatttgctaaactaactcaattggcgaaaccgggtgatgtgattacggttaccaagctggatcggttagctagaaatacccgggaagcattaaatgttattgacccactaatgaatcaaggagtgaagatcaatgtacttaacattggcatgttggaaaactcaactgtgggtaaattagttaaaacaattctcttagcagtggcggaaatggaacgggatatgattgtggaccgcacccaataagggaaacgttatgctaagttacaccggtctgattatcatgaaggacgaccccaaagagccattaccccgcactaccaagccgcttatgagtacttgcttactcattcctacaaacagactgcgagtgcttttgatatttcgatttcaactttgcaacggatccgaaagcaggtggagcaaaataatatagcttagttttaaaaaagtatatattattttgcgctggaggatttgaaaaatggtaaaatgttataccccatttatttactggattgatactaccggtctagactggcaaagcgatgaaatcattcacctaaccataacggatttatttggtaacattgtgttctcacatctgtttaaaccagtgaaaattgaaagttgggacccaactcagcagggtttccacacaaaagcacttgccccccccacatattcaatatataataaattacgcgtggtgctagttaagtcgttttagttaataaaaaagtccaatcggattagactcaagttgtaacttaaattaaatagaaaagagtctgatctaattgaactatctcaagcttaatcgtttttctcaccatttacaagttagctttgctcggctaaatgtaatttgtcgttctttgtacaagctttgtgctcctgatgagctgaaataccgtaaaaatattgatcaggttaagctcttagacagttctattttagcaatgcttatttggcaaactgaaattggtatcgaatctcaaagaagattttgtaaattctttgtcggtttgtctcattctcgctttaatcgtcgggcacgaatgcttttgcctttaatgcgctgtatccgtcaagattggaatcaagaagtaaaaacagctggagaattcttaattattgacagcttcccagttccagtttgtcagcccatccgcaactatcgcgtcaagatctttcgtggcatatctgatatcggatataaagccactaagaaaatctattattacggcttcaaggttcacgcgatagtaagtgatgacggctatgtgctttggacaccatatcgaagaaacatgaaaggcgctaaaaagcataacgatcatcaactgatggcaattagaagaacaattgagagcgacttttctttgcttagctactataacgctgaaaataactgggcaaggagcttagctggttttcagcagcggctagaaatagccattttggcttataatatagcatattgcctagaacgatttaactagcaccacgcgtaataaattgcgtcttagaaagaggatataaaatatggacaaattacataagcaacaagtagcaaaacgacaacgatttgccattaagaaattaacagttggaacggcatctgtccttgttggcttaaccttcattattagtggtaatgccaaggcagatacgacagttgctgctcaaaatacattcacgactcaagtgactgatccacaagttagtgcccattcaagcaatattcggattagcgacgaatcaaatacggttgttcatcaaacttcatcaacattagttccaaataaaacaacaacgccagcgcaacaaatgccgataatccataaaacacagcaaaacaaccactgcccagtaagtacaacaaacaacagcaaaacaaccactgcccagtaagtacaacattactatgaattttcgcgatgtcaccctacataagccaattcaagtgattagtaatggtcattatgtattcaaacaacctttcaagcagaccacaattcgaccaggggatagtgtggatcaagaatttactgtggccggttataaattaatgaattcagaagttttgaataagtatttctattttgataaacaaggtaatgcctgccttaagaaaggtattactacgcaagacattaacattaatttagattacgcatcattgtcaccaatcaaagtagagtatgttgatgtagataacgggcatattttagcatcaatcgttctagatagtttctggatggcccctgaatctccacaacaccgtgctggtgataagaaagcaccggatgcatcacgctatgaagccgcagccattaatattcctggatataaattagtttctgaacctgttttaaagggtaaaatcactggtcaaactcgaaattcgttagctgatcctaactatgtttatttaactttcaagtataagaaggttataaaaaataattctgatagtaataggactgaattgttacttgttccagaagaaacaaatctaccgtacaaattctttacgattgctggtagctatggcaaaaggattgacctaaacaatggtaattatgagaaaaaaatgagtgaggagattagccattacgaaaaacaaggttactcctatataggaagtacagggacatatcttaattctgattatttcaattggtacgctaaggggatacatgtttacttgctaccaaacaaaccagtaactgtgaggtacattgatgagcaaggaaatgtgcttaggaataatgatacgcttgcgttcaacctagataatcctaaccaaaaaaataatggggttaatccgcaaaaaggctggtatgcaaatggtccatggcaagtccaacctaagaaaattaaaggttatcgtcttgttcgtactcttggagtaacgagtggccagtatactgtataccaatacaccacaacttttgtttacactaaggacacagatccaactgatcccaaaacgccagagacaacaacaactgatccaaagacaccaagcgataagcttccggacaatcctggcaagtctggtcagacagttctagttaatattcacattcctgatggttatcaattagttcctggtgaaagtgttccaacatcttacaccttcaaggatggtaaccctaatcaaatcattagttgttggttgatcccaactaatggcggtcaaccaacaactaatgatcatcaaggacaaggaacaccagctactaatacgcctacaaacactactcctaatggaaatgctgttactggcaaactagaaggtaatgttcctaacatgcaaactgggaagacgattacgtctcaaccaacgacagctaaggataaccaactaccacaaactggtaatgacaatagcttaacaaccgttgccgggattattgtaagcctgttaaccagttgcttagctgttcttggcattaataaacatcaaggctaatatgattacctaccaaccattccgaagctaatcaagacgcgatgctttaattagcttcggaattttgaatgatatatcattataataggatggaataaactttatataaatataagtaatggggattgatttctaatcttttaagaatactgtttatggttgattttttatacaatgtttccaactgagagtaaatataaaaagggagatactatgttatcagcaaagaattattacggccgtctggtaaagttaaaaccaaaacaagatcatttttcacttcgtaagttatctattggtcttatttctgttaccataggtattaccttatacttgggagtggacaactcctatgttatggctgatacgaatttgagggataataacaatcaacaattagccggatcgggtaatggcaccaatataataaatgataaagttaaaattccaaccggtgcttttcagtctaaacaaatgcaaactgaaaattgcaaagtaaataatcagatgttggataaaactgaagtaacaaattctactaaaaattcttctacactaaatgtggaaaattccaagactgctgatttgtcgagatttgattactctttatatacaaaaaaagtaaagagttttgaatttagaaattcagataataacgatgtaattagaacagtaatattaaacaaacctaccggtgttgaaactgtaactatgactttgaatgttagctgcttaaaagggagaaagcatcagcatcgatcgcacacatctactagatcgagtatttataattataaacctcaagttattgctgaagtaaatacatccaataatccattgccaaaaatatcaattttggagaaaaacgttttaccaaaaactttttttcaagtagataagaatacatttcttactcaacaggataaagagaactatgagaaatttatatcagttaataagaatgatattagcatagaattaccagctttttccattaatgatattgatattccaggctattcttatcatattaatgcaaaaaagactactcctggagcaggattaggtaaagaaaagttttacatctacactgaatcaccacaaacagttgttatcgactataccccgattacggttaaggttgaacataagatcatcacggtaacaccaaccgatccgaagacaccaagcgataagcttccagacaatcctggcaagaactatccaaagggtgttgataagaaagatctgaacaagactgttaagcggacgattactgttaataaaccagctggctcaactgttgatgctagtcaagagactactctaactcggacggctactgttgacgaggttacaggccaagttacgtatggcaaatggacaacctcaaagcttgataagtataatgcaccagaaattccaggttacactccaagtcaagcagaagtccctgcagttgatcaggtaacggttgattacacagatccaaaaattgaaattacctacacgccaaccgaacagactgggaagatcacatacgttgatccaaacggcaaagaagttggtactaccccattaacaggaaagacggatgaagagattccagttacaccaaacgttcctgcaggttggcagattgttcctgatccaaagattccaacaaagatcaccgctactccagacggcattcaaacagttacggttaaggttgaacataagatcatcacggtaacaccaaccgatccgaagacaccaagcgataagcttccagacaatcctggcaagaactatccaaagggtgttgataagaaagatctgaacaagactgttaagcggacgattacgtctcaaccaacgacagctaaggataaccaactaccacaaactggtaatgacaatagcttaacattaatgggcttaggtgcctccaccttattgggaatgtttggccttgctgctgtaaacaagaagcgtaagtaatcaaattagctctacaattttatccctttgtcagtactgatgaggtattttgatgaggttagtttaagtagcgaagctgcttgagctgaccttttcttttagcttagtttttaccatgagatttgagagctagtagacttcggatacgggaatgatcaaagttgcgaaaaccataagctgttattctagtggtcttaattttattattgtaagcagtcgttatcaatacgggttgaacaaagggactctacaattgtaagtactgatgaatttaacatcagtgcttattttggttttctacgaatagtcaaggatattaaaggaattccttggaatttagctggatagaaaagttaattaaataattaaaatggctcaaagttaaatttaaagtataacaaaacaagctcatgaactagatttattgaaactgtcaaatcttttgtgtaaatagttctttctcgtaaattgattttttaattatttattcaaaataggattctaaggtatcctgaacctgaccaaagcctttatgaattcggttgaaatagcggtcattgtagctcattgcctggatgccaataaatgcatcaagcgactgttcagttggaaattctgccttaggcttagctttacgcttgatgacgttgttaaaggattcaatcatgttggttgaataaattgaagctctgatttgtttgggataattgtagaagaccagcagatcgggctcaatttccttcaaacctttgataacatggctataagctttattccatttggcatagaattcatgcaagacagctgcagcttctttttggcttgtctgttgatgtatctgcttgaattcgttcatgatcttttcgcggtcatccacccggactttagcacagatattgcgcatgacatgaaccaggcagcgttgaaaatgagctttaggataagtcctggccaaggctgttttcatgccaacaacaccatcagaaagaaagagttcaacttgcttcaagcctctggacttcatgttttgaagcatctctgtccagacttcaatgttctcactaggagcaatgcagtagtcaatgacttccttatgtccattaggtttaatgccaatggcaatatagactgcttcacgctcaaacgtttctcggcgcaaaggaaggtatgtcgcatccaaatagacacagaaaaacttgtcgcttagcttgcgcttgtgataagcctcaaccttggggagcatctgcttggaaatatttgatacttgagctggactataatgactgccatacattttctcaatcaagtcagcgatttctctggtagttacgcctttggagtagagcttgataatcgtgctttccaaaacatcagagtgctgcttgtagtcaggcagcgtgtgctgatgaaactgaccgttgcgatctcgaggcacttgcacttcaattggtccaaactgggtatcaaccttgcggaaataagcaccatttctagaattgccagtattccagccatttctggcatagggatcatagcccagaaaggcagtcaattcagcttctagcaagttattaacagcctgttgtagctctttgcgcaataaatcgtttattttgtctggattgaatagagcttgtgctatatttttggtaaaatcattcatgaaggagttcttctttctgtatgtgtttttttgttcaaaccaatcatacgagaaaggaactcctttttctaatgtttaaagaaataaatttaaggaattattcatccttacacaaactattttacagtctctccaaagagtttaagcagcgaactattgaacaagcaatctttggcaataaaccatacttacagctgcctttggaactggggtttaaaagtattggcatgcttaacaattggattagagaatataagaaaaacgggtataatgtcattatcaaacagaaaggacgccctgcccgtgaccaaagaaaagcagaaatctcgcaaggaactggagaaagagatccagcagctgaaagaagaaaacttgcgattgcgtattgtgaacgaatacgtaaaaaaactaagtgccttggatcaagaagatcagaagaaatagctagggtgattacggatctaaggcaagaattcaaagttagtttaaattatgtattagctgcgattgcagagcaccctgagctacctataattgccagaagctcatactacaagattatcaaacgacagcccgtcaagcctaaacggtcaaagcttattgctagaatccatgagatttttaatcatcatcaaggccgctatggatatcgcagagtagctttgcagttaatcagagagggctggaaagttacggagaaaaccgttcgctattggatgcataaattaggtcttaaaggcatcaggtgcaataagcgcaaatattcaagctataaaggtactattggcaaaatagctccaaatttaattcatcgtgatttcttcgcagccctgcctaacacaaaatggtatactgatatcactgaatttcatcttaataatgaaaagctttatttatcgcctattctagacggctgcggtggcgatatagtttcttatactatctccaaacatccagatatggatttagtaatgacaatgcttgacaaggcttttgccaaagaaacagctcttaataactgcatttttgatactgatcagggctgtcagtatcaaagccctcgttatcagcgagctttaaaactccatggtattactcaaagcatgtccagaaagagcaactccatggatgatgggctaatggagaacttctttggcctgctcaaaactgaaatgttctatgatcaagaatacaagtatcataatcttcaagaattaactcaagcaatcgaggaatatatcgaatactataacaacgaaaggataaagagcagattaaaaggcttaaccccgaaagagtatcgaagtcaagcctctattaatccaatattttaattgtctactttttacgtctcagtacagtgctttcgaggcttttcttttatattattttttcttagaaatagagtcacggatatttaattgactatggcaagtgatcgtaagtggaatttgaatatcttccgtaattagatctttagccaaacgaacggcagtcttgcccatttcttcagtattcatatagacactggatagggtaggagttaagaagcgattgatatctacatcatcaaaactaacaacagagatatcgtcagggatgttaacacctgcatcactaaaggctttataaacacctaatgccataggatcactaccgacaacaacagcagtaggacgttgttgcagttttaagatctcttttccagcttcaaaagcagagttagttgaccaatcagtaataaaagaatggcagtactggtcaagattgtggagtttcatccaggacaagtaagtgagttcacgtagatcatttttttcacaagcaatcttaccgtcaagatcaagaaccaatgattttccaccgatgtaaacaatgttcttgtgtcccaggttatagagggtatcaagaatatgagaagtttcttccacaaaatcattacgaacgatattacaattatgaatattggtgttgacgtcgataaaaattatatggggattaatgctttgaatctgcttaattgctacaggtgtcatttcaccctcgattagcactgcgccaaatttagctaagtcagcccaatttttattatcatcttctattctaaaaggttgctcaatacgtaaatgccatttcttggcttcttcattaatgcctttatgcagattgagaaaatagggatcggtgatttcacgagatttgttataacgcatgattagtgcaatcgagagctggttatcagtttgcttgggaccaggatgtttttgagatttcgaataatgcaggcgtttggcggtttcgataacgcgggcacgactagcctcattgattctaaaagttggatcattgtttaaaattcgtgatacgctagctggcgataccccagcaatacgtgcaatgtctctaatacttgccataaagatgctccttgtttgtttactgtttacattatacaacttttagcaagaaactggtgtataccaaacttgaggataatagtttagtgtccataaagtaagtcatattgaatcaatgttacttactttatggacactaaatttacttattttactacactacatagtaaagtgtagtaaaataagtaaaaaagcaattgaaaaagaagaatatggaaataataaaatcttaataatttgttcgcttgtttttatatttgtaattcattaaacttatgttcgaaataatgaaaggagaaatatatttttcaattgtaggtaatataattccatattcgtatattgacagtacttatgaaacaaaaatcattgattagtcaactagcaaaaatacataacggtacaattactcatcgtgaattagcattaaatggagtatcaagttatagtatttcgaaagctgttcaggatggtacgttagaaaaaatacgtccgggaatttatttatttggtgatgataccgaggatatattttatagtttgcaacaaaaatataaaaaaggaatctattctttagaaacagcattatatttatgggggttaagtgatcaatatccttttagcttagatatgacttttcctaggggctacaataatccaactttggatattgaaataaatccacatattcaaactaaaagtttggctactcagggaataactcaaactgaatcattcaatggaaatgtgattaatctctatactcctgaaagaactctagctgaaatattgcgaccgattaatgctgtagatatcgaaataattaccaatgccttcaagatgtggaataaggaaaagaaaaaagacataaatacattaatgtcttttgcagaaaagtttagggtaactagaaaggtaaatagctacttagaggtgttgttgtgaaaaattatgttgatgagaagcagttcaaagcagatgtaagaaggtatgctagagagcataatataaaaggaaatgagattggtcgattatggcaagaaattatgttagatgatttgctagaaagaatttcagtatcaaaatatcgagataatttcattttaaaaggtggttttttgttgtcggctattgttggtatcgataaaagatccacggaagacattgatgctgagataaaaggattagatttgaccgaaaaacaaatagctaaagtatttgaagaaatctgtcaaataaaattagcgggggatctattaagcatttcgttgtcagaaattgaacagattcatgagcatgaagagtacaagggctatcgattacattttaatgcttcttttcggaagataagatatccattaaaagtagatgtttcaacaggggatgttattacacctagggagattgaatatagctataaattacatttagaagatcgacatattaatatttgggcatatactatggaaactatagtagcggaaaaattagaaacggtaattacgagaggaatagctaatacacgtatgaaagatctctatgatttattcatactgcagagagaacgaatcaatttagctactttaaagtcagcttttgctaatactacgaattaccgtgaatcaatcttttggacaggacaagatatagattataagtattgtctaagacaagtagatattattgctgaaaatagtaatatgcagaatctttggaatagatacgtgagaaaacatccttttgctaagggaatcacttttactcaagttattcaggcagttcaaacttggctaactaaattagagtttgaaaaataatttcaatcaaaaatgacgctagttgatcgaaccagcgtcatttttttagataatagatgtagaaaatagtttgaaaaacgattagtttttatagaaatctttattatactttacttgtcttcgtagccctttgggtgactcttgtgccagttccaagcagttgcgataacgtcatcaacactttcatgctttggcttccagcccaaaatagttcttgctttggttgaatcagcaaccaaagagtcagggtcaccgccacgacgtggacccattgtgtaaggaatatcaatccctgttacttttttagcagcgttcaaaatttcaaggttggagtaaccttgagcagtacccaagttaaagacatctgacttattagtctccatcatatgtttcagtgccaaaatatgagcatcaattaaatcttcaacttgaacgtagtcacgaacgttggtaccgtccttagtgtcatagtcatcaccaaagatagtaaacttaccatccccagaaattgcactcttcaaaatatttggaatcaagtgtgtttctggtgcgtgatcttcaccgattgtgccatcacttgcagcaccagcaacgttgaagtagcgaagagcagtgtacttaataccatcagctttatcagcccaagccatgatcttttccatcatcatcttggtttcaccatatgggttgattggatcaagtggggtgtcttcggtgattggcaatttcttaggaataccataagttgcagcacttgaagagaagactaagtatttaacaccagcgtcattcatagcttgtaataatgaaatcatgccagtaacgttattgtcatagtacttaagtggctttttaactgactctggaactaatgaatatgctgcaaagtgcattacagcatcaatcttttcatcacgtaaaattttgcttaccaaaaaagtatcttcaatatcgccttggtaaaacttagccttaggatctacagcctttctgtgaccagtatataaagcatctaagacaacaacatcattgccttctttaactaattcgcgtacagcgtgtgagccgatataacccgcaccaccgacaactaaaactttcatgttttgcgctcctttattttagttattatcttttattgaaatcgattacattataacacatattttagtaaataatttacttattttagataaattatttaaaaacactaatttagtctaaatgaaaattcatgatcttgacttgggtcgatttgatattgatcttcaacatctgtaccccagctatcgatgccacctacaccgcgaacggcacctgcgattactaaaactgttctccgggcaagaggcaattcttcaatatgcgttgcattttctagttcttctgctgtgtagggaaggcaactgaagttgaatggcttatcagtttgctcaacggtgaggtcaaaatcctcattagaatgatcagcattgttgagcgtagtatttctagtgattttgagttgatgcgtttgcatgtgcatcccattttcctgtggcactaggtatttggttactggcaatcccttaattttaaaagagccagcactggctccagccatccgatcaggataagtctcaccagataagccttcatattcaaagccactagctagagttggtatgataaagcgcattccaattactggaagcggtggtaaatcttttttaccaaaataacgcatcttaattataacatgaccattattgttaatttggtaagtaatttcaacttttgtttttggacctgaattgtcaaattaagtgcaacagttaggttatgaagagatatattgcttgaagagttcctctgctgtgtgatattggaggattcggcgatatttgtggttaatggcatcagttgcctgttgaacataagcttttgacttgtctttcatgctcttgcccttagggaagaattgacgcaaaagaccattgcagttctcattggtgcccctttcccatggagaatatgggtgagcaaagtaaatctggcagcccttgatcttggtcatatccgcaaactcagagccattgtcaaacgtgattgatttaaaccaggcaggatgtctgtcaatctccttttgaagcagcctttggcatgtgcttgcccgatagtcaggaatcttgataactacttcaaagcgtgtggttctttcagtcaaagtcattaaagcaggctgattcttgcgtctgacgcctttaaccagatctccttcccagtgcagcggagcttttctgtcttcaacctccttaggacgctgttcaatggaattgccaagatgcttcttgtgcaaagcgtgaccgccatggctgtgatgacgcttgttcctgcgtcttttgagcttcataggcagatcaatattgcttatgtccagcaagccctgatcaatatagcgatagacggttggtgtgctgggacaagggtagcctggcatagtccttttgaattcaccaacgaactcatcgatgctggtggcatcaaatttagctttaaagcgtctggagagcattctcaaaaagacagcataatgcttcaatggattgcgctgatagcagtttttgcgacgcttctcataataaatctgtgcagtatcagcgtaatagtgctcatacaataaatagctgctgtctctttgcaggacgcttccgcgtttgatttcgcgactgattgtcgacttatggcagccaacttcttgagcgataacagtacgggaagttatgccggaatccagcattgcttgaatttgtccacgttgtacgctggttaattgatgatagtgcttagaaatgctagaatttgaattggtcatgaagatcttcctttcttgatttttcgtcacttcaagtttaggtcttcatggcctttttgtttaacacttagtgttgcacttcaattttaaatccgggttttgtttttggaatagttaaagtttcataaataaaagtaatttcgactttacttgcgtactcatgattagaaaattggttgttgagtggagcgattggcaaatctgcaaaatcatgttgatcaactttgagctgaatttcagtacagtggctaaacatatcggcgccgagccattgagctgcttttaagttgaaaccgttgccgcgatcgttatcagtagttgcacgccaaaaggttggggtaggaacgcgataaaaccattctttacccttaatttttaaagactctaagccacctttttcatagctgaaaatatattgcttatctggggtattaatgcctaaagtagcatccccatagattatatgtaaattatttgtgtaagccatagtagtatttaacctcctgcattgctggttttggtgtacgatcggcgaacattaagccatcgcctgaaaattcataatcagagtgtcggtcgtcaaagtcgccgccataccgtaatacttcttggccactcaccggatcgtgtactaatagcgcttggtcgatgaagtcccaaataaagccgcctaaatattgtgggtattggtcaagcaatttaatgtaggaacccatgccaccatcagaattacccatatcatgcatatattcgcattctaaaaatggcttttgaggcttatttttaagatattcttcaacatcttttggtggtaaatacatccagctttcaagatcagaaatcttgtcctttaattctggcgtatgaaccacgccttcatagtgggtcaggcgactatgatcgtgtgctttataaaatttattcatagccgcaatgttttctccggcatatgattcattgccaagagaccagaagagaatggcggtatggttttttaaagtttcataattgttgcgggcacggtcaattacagcttcacgccattcaggaatagaaccgggaacattatctgaaggttcaacttgtcccatcttttgccaagtaccatgtgattcgagattattttcagccatgacatagattccattttgatcgcagagatagtaccacggaatctgattaggataatggcaagttctaaccgcattgatgttattttctttaaaagcatgtatatcttgtttcatatcagttaaagtgatgctgcggccacgcttcatattccattcatgccgattgaccccattaataattagacgttgaccatttaataaaacaaccttgtcagaattaatttcgatttttctaaagccgaattggtaaggaattagttcaagtaaatcaccattttcagcgtgaacttcaataattagttggtacaaatatgggtcatggttatcccaaagatgcacatttttgaataattctttttcaatttttatggttaagctgattggtgcttttttctcaagtagagttttgccattaatatcttctacgaacaagtgaactgagccagtatttttgcctgtaaagtgcaattgagcattaaagattccatcttggtaattatttgtaacttctggttttaaatcgagatcggttaaatgcgtctcaggtaggccgagcaattcaactgaacgaaaaatgccagaaaaacggaacatatcctggtcttccaagaaagaggcagtgctatgtttgaaaacttcaactgctaaaatattgtttttgtttttaatgtaaggtgttagatcaaattctgaaggagtgaaactatcttcggcgtaaccaacaaaatgaccattgagccaaacatacattgctcgctcaactccttcaaaaacaatgtgaacatcacgacctcgcaaagtggaatttaagtcaaaatgcttaatgtaagagccaactgtgttatctgcacctttgctaaaagagtcggtagctttttggttgattgtgtaagcaggtcgacgataaatttttccttcccacggaaagagcgtattaatatattgattttgagcgtaattatttagctcaatttcacttgggactggaatgtgatcaaatgatgaagaatcgaaatctgttttaaagaaatcaacgggtcgtgtttgtggattagctgaaaacttaaaacaccagtcaccatttaaactttgaacaaaactactagtttgcttttgccattcgcgatagttcttgaaatagggatgatcgctgtgggcaggaacttgattaacgcggaaaacttcggggtcatcaagccagctaagatttgctttcatgaaaatacctgatttctataaaaaaattaaccttgaaaacgcttatattataacacatagataataaatttacttaataagtaaattatttactgaaaaatattttgaagattaatatttttgactcgaaaacgaatgacaaagtgcttatgatatttattggaattacgtaaatattttgtataataaagttaaaaattatttatttaagatagaaaagatataaatatgacaacaattaaagaaatagcacaagaatcagggtattcttcagctacggtttcgcgcttattaaataatgatcctaatttgtcaattacggctgatactaagaacaagattttagaaattgccaataaattgggctattggaaggatcatcaggaaaagaagatccgtccaacaattgcgttactataccgagtaaatcatgaagagcaactgcaagatgaatattttacttcattaaagcaagcgctgatttcaacagtagaagcagagtcgctgcagatgaagactttttatgatgcagatgatttgattaaacatgcatcactttttcagggctttatcggagttggcgcggcgccaattgaaaatgcaacactaaaaaaactccatgaggttttgcctaatggggtctttgtcgatactaatccagccccggaattatttgattccattcgcccaaatttaacgctgacagtaaaaaatgcaattgatctttttcttgataaaggatatcagcgcattggttttataggtggcattgggcctaagcatgatcatattcaagaagtagatgtacgtgccaccgcttttgcggagtatatcaaggtgagaggcaaaagtgatgaattgatgtttgttaatggcccgtttagcgttgctaatggctataagttgggaaaagaggtactggctaaatgcaaaaataaattgcctgatgcatttttaattgcttcggatactttggcagttggagttttgcaagcttttaatgagaacaatgttaatgtgccaaaagatactgcaattttaagtattaataatagtaatgtggttaagtatgtttcaccgccactttcttcttataatattgatcaacaagagatgattgatatggcattaaatatgctaacgaatctgattattcaacctaatcgggcacacattgatgtaaatatgaatactaatttagttgtgcgcaagagttttgtgcctaagaagtaaattaattagtaaataaaaatattttttagtaatactatcaaaagagaatgctaatttaatgcgttctctttttgtttagctttcagtaaagaatttattaaatataaataaattctttacttaacaaaaatagagaatatactaaactgtgtaaacgattacaattaatgattgctttagggggcaaatttatgacacacagtgacaagtcagggaagcagattctttcctacgcatcattctgtttgggtaacttaggtcactcggctttttatggtgtgatgagtacatattttattatttttattactagcagcatgttcagcggacttaatcagtccgttgcagataagctgatcggcttaattacaggattgatggttgtaattagaattgctgaattggtaattgatcctattctaggaaatatagttgataatactaaaactagatggggcaaattcaaaccttggattttaattggtactttagtaagtgccgccttattattagttttgtttactggcatttttggattagcacaaaaaagttggattctctttgcgattttatttgtactaatttatatcagttttgatgtattttattcattatctgatgtttcttattggggcatggtaccagctttaagtgaagattcacatgcacgtggtatttatacttctttaggtgccttttcaggaacaattggttggaacggattaacaattattgttgttccattagttacagctgtgacttatgcggtaactggtaaacatgaggaaggtgcaccaggttggttagcatttgcggcagtaatttcagctttggcaattgtatgtgccttgattgtttgtttcggtactaaagaaaagcataatattattagaaactcagctaagcaaaagactactttacgtcaagtattcggtgctattttccataacgatcagattttatggccaagtttagcatacttgctttactcattagcatatgtaattaccaatggtgttttgttctatatgtataaattcgttattggtaagccaaatgacttctgggtagttggtgttattgcaacaattatcggtttctgtattagtccaatgttcccaattctgaacaaatacattccaagaaaatggttattcatcgctggacaaacttgcatggttttagcttatgttttgtttattttcggcagagacaacgtatttttgatggacttgggcttggttcttttaaacattaactttgctcaattggtaactgttttaacattaactgacgcaattgaatatggacaacttaagaatggtcaaagaaatgaagctgttgttttagctgttcggccgatgattgataagtttaccggtgcggtttctaatgctttagttggttatattgcaattgctgctgggatgaccggttctgcaactgctgcagacatgactgctcatgatattagcacctttaatatggtggcattatatatcccacttgctttggcagtcttatcaatcgtagtctttttgactaaggtaactttatctgaaaagaaacatgccgaagtggttgaagaattaaaagatcaacttgcagaaggtaagattgaaaagaatgaatctaatactcaagttagacctcaagatcagactatctatgctcctgcagacggtaagttaatgaagatggcagaagtaattgacgaagatggtaagccattcccaggaaagggttttgcaattaaaccagattcaggcaatatttatgctccatttgatggtgtagttaggttcacttttggtactaagcatgcttttgaaattgtttcaaataatggtttacaagtagttgttcatgtcggcttaggtacagttaacttgcgcggtgaaggttttgaaacttattatgatgatggtcaaaaggtaaaaaaaggtgacttgctgttagagtttgatcgtaatttagctcttaagaatggctatcaggacactgtagttaccttctatacacaaccaggacgaattgtaaaatctagtgaaattgaagctggtaagattgttgagcatggtgaaaaagtattagatgtacaatttaagtagaggaattacaatgacacagttaaaacgttttttatatggtggggactataacccagatcaatggccagaagacacttggtcagaagatattaaagtttttaaaaaagcggatttaaattctgctacaattaatgttttttcttggagtttgcttgagtcaagagaaggccaatatgatttttcaaaattagatagaattattcaagaattgtctgatgcaaattttgatattgtacttgctacttctactgctgcgatgccagcttggatgtttaaaaaatatcctgatgtagcacgagttgattatcaaggacggcggcatgtctttggcgcacgacataacttttgccccaatagtaagaattatcaagttttagctagtaaattagtcgagaaaattgccgaaagatatagtaataaacctcatattgctgtttggcatgtgaataatgaatatggcggcaattgctactgtgaaaattgtcaaaatgcttttcgtacttggctcaagagtaaatatcaaacactagataacctgaatgaggcctggaatatgaatgtgtggagccatactattcatgattgggatcagattgttgttcctaatgagttaggagacgcctggggaccagaaggtagcgaaaccattgttgccggtttatcaattgattatttacgttttcaatctgatagtttacaaaatctttttcagatggaaaaatcaattattaaaaagtatgatactaacactcctgtaactactaatttccatggtttaccaaataagatggttgattatcaaaaatgggctaaagatcaagatattatttcttatgattcttacccaacctacgatgcacctaagtatttaccagcatttttgtatgacttaatgcgtagtttaaagcatcagccatttatgttgatggaatctgcaccgtctcaagtcaattggcaaccatatagcccgctgaaaagaccagggcagatggcagccacggaattgcaagcagttgctcatggtgcagatacggttcagtttttccaattaaaacaagcagtaggcggctcagaaaagttccatagtgccgtaattgcccactcacaaagaaccgacacgagggtctttcatgaactagaagatttgggtaaaaaattaaaaaagattggcccaactgttttaggctctaaaactaaggctagagctgctattgtatttgattgggataacttctggtcatatgagtacgttgacggtattagtcaagattttaattatatggaatcaatcttagattattatcgccaattttatgaacgcaatattccgacagatgtaattagtgtcgatgatgattttagtcaatatgatttagtagttgctcctgttttatatatggttaaagcagggctaagcaaaaaaattaatgcttatgtcaaaaatggtggcaactttgtcactacctatatgtctggaatggttaacaatagtgataatgtctatcttggtggctatcctggcccgttaaaagacgttatgggtatttgggttgaagaaagtgatgcaattgtaccaggacataagacaattgtttcactaaatggcaaggattataaagcgggtttggtttgtgacttgattcatccagaaaatgcaaaagttttagcaaagtactccaatgagttttatgcaggaacggctgcagtcacggaaaataaatatggtcaaggtaaggcctggtatgttggtactaagttggatcacattgggttgacgcagctattcaaccatattgttttgacagctaacgttgaatcattggtgggcgacagtcataagttagaagttactaagcgagttactcagtctgggcaagaattatactttgttttaaatatgagtaatgaagaaagaaaattgccacaaaaatttgtagagtatcaaaatattttaactggtcagcaagctcatgatcaaatgaaggcatgggatgtacaaatacttgttaaataaatgattttttccttaatgaagacaagaagttagacaaacgatctagcttcttgtttttttacttaaataaatattttatttatttaagtaaactatttactaaaagataatgaagagatatactaataactgaaaacgattacagaataaatttgaggtaaaaacaatgaataaggaagaattacttaaagaatatgagacaacttttggtgaaaaaggtaaggatgtctttttctcacctggtcgaatcaacgtgatcggtgaacacactgactacaatggtggtcatgttttcccagctgcaattagtttgggtgtttatggtgtttacggcccaagagaggataaaaaagtttgcttgttttctggcaatgttgatggcgatatcgtggaattcgatattgacgacacaactgttgagaaagatgatcgcttttgggctaactacttcaagggcatgattacgtacttacgtgaaaaatatgacaacattgatcatggttttaatctttatatcaaagccaatttaccatcaggttcagggctatcatcaagtgctgccattgaaatgctaatgggcatcattttaaaggatgaatttaacttagatgttgaccggattgctttagccaagatgggtcaaagaacagagaatgaatttgttggcttgaattcagggattatggatcaatttgcctgcattatgggtaaaaaagatagtgctatcttcctcgattgcaatacattagattatgagtataagccactcgctttaggcgattacgaaattattattatggcaactaacaagccacataccttagccgattctgcttataatgatcgtgttcgtgaatgtcatgatgcagtgaagaagttgcaggctaagttagatattaagactttaggtgagcttgataatgatacttttgatgaatatgcatatctgattaataatgaaactgaaattaagcgtgctcgtcatgctgttagtgaaaaccaaagaactttgcgggcaacaaaggccatgcaaaatggagatttggaaaaattgggacgtttgattgatgcttcacacgtttcacttcattacgattatgaagtaactggtcaagaactagatactttagctgaagcttcatgggctcaacctggcgtcttgggtgcaagaatgattggcggtggcttcggtggtagtgccattgcaatcgtcaagaaagaccaagctgaggcatttaagaaaaatgttggcaagatttaccgcgacaagatcggttacgatgccagcttctatgatgcggaaattgttgatggaactaagagaatttaatcagacaagaggataagtatgaaagttattgaaaaatttgcggatgaagttattaatagtggagcgtatgagccgctcgatcgcgtatatgtgattaacaaaattcgcgctttagttggcgatgaggcaagtagcgttgaagctaatgatgaacaaacttcagttaagcaattagttgatttagccgtgcaaaataaaaagatttcggatgatgttacttcacgtgaagttttgaatgatcaactatacgacttgataacgccaacaccatctaaaactaatggcatcttttggcaaaaaatgcaaaaatcacctgaaaaagcaacagattggttttataaactttgcgaaaacaacaattatgtcaaaaaggaagcaattgccaagaatgttgtattctcagggaccagctctaaaggacatggcttagaaattacaattaatttgtccaaaccggaaaaggatcctaaggcaattgcggcagcagctcatgcaactggtaagaaatatcctcaatgtgcactttgcctagaaaacgagggttaccttggtggatatggcaaaaatgctcgttcaaatttgagaattattcgcatgaatattggtggccgcccttggggatttcagtattcaccatatgcttacttcaatgaacattgtattttcttagatcaaaagcatattccaatggtcatcaaccaacaaactttgattaatttggttgaaattgaaaagacgttaccacattattttgttggttcaaatgctgacttgccaattgttggtgggtcaatgttagcacatgaacactatcaaggcggacgtcatacttttccaatgatgaaagctaagattaagaaaaatgtagtctttgatgattatcctgaagtggttgctggcattgttgattggccaatgagcgacttgcgcttgattagcgataattcgttagatttgattgaattgggcgctaaaattattaatttctgggatcattattcagattctgctcgtcaaattaaggcttttgatggtaaaacacgtcatcatactgtgactccaattatgcaccgtgaaggcaagaacttcgtacttgatctagttttgcgtgacaacaacactagtgaaaattatccgttaggtattttccacccacataaagaattgtggcatattaaaaaggaaaatattggcttgatcgaagtaatgggccgtgctattttgccaggtcggttaaagagtgaacttgaagaagttaaaaaatactggttgggccaagataataagatggctattagccacaaagaatgggccgatcaaattaaagcagagcagaatattactgccgagaatgttgacgctgtgatgcagcaagctttagttgaagtctttgaacaagtattgcaagatgctggtgttttcaagaataatgcagatggcgatgaaggctgggataagttcattaccgctttaactaagcagatttaactcatcaatgtttaaaacgagatctgtttgatctcgtttttttgttagcggtaactcatatattctgatggttaaataatttataatatttatgaaagcgaatacaaaagaagggcaagagtatgaagacaagttttagaaaatatggcagaaaagataataaagatctttgtgaaatcacactagagaatgatcacggtatggtagttaaggtattgaactatggtgctacattggaaaaggtgttgcttgatggtgagaatatgattttgtcactggataagccagaagattacgacaaggagcgtaattatctaggcggtacggttggacgtattgccggaagagtgagacgaggtttatggcggcacggcttagaattacatcaattaccaatcaatgaagggcctaaccacattcatggtggtattgggactgatactgaaatttggaattttagacctagttgtaatgaaaaaggtgctcgtgttgatttaacactttttgatccagatgggcataatgcttatcctggtaatttaaaattacacgctcgttatgagttagataataacaatattctgcattattcattgggtgccatgagtgataagctgactatttttaatccggttaaccatactttcttcacattaggtgaaaagaaaatgattaatgacttgcaactgcaaatgaatgctgattattatattccagttgatgagactggcttgcctgatcgtggtatggaaaaagctgatggaacagcattcgattttagaaagaagaagcgagttggggatgcattggaagctgatgatccgcaaattaagaaccgcgatggaatggatcatccatttatcttggatggcaatatgccaaatgcagtgctaacttctgctaaacacaagttaacggtaacgactaatgcgccatctctgattctgtacactggtaatggctttgaccacactggcaagtatacagctgactttggtccgtattgcgggattacttttgaagcacaagtgccgccagcagaaggtgatgatttgggacgcatcacgcttttgccaggtgaaaaatttaagcggactgttgattggaaatttgaataaaaatatggagaacatccttactgaatgaattggtagggatgtttccttctttggatattatgatttgattttacaagtaaatccatattaatatttaaaatatttagaaatcaactgaaaggtatagtaaaaatgatgacaaacgaaaagattattgctttagtcaaggaagaatatctaaacaagattccaaaaatttttcgcaagcatgctgttgaaggcacttgcaagttaatcgctagagaacatcccgatttatacaaggcttttgaagatggtgaaccaaccgcagaagaaaaacaacaaatgacagagttgattaacgggattttcgaacagagaatgaaaaagcataagatgttataaaaagacgctggaatgtatgattattagatcgctacattctagcgtttttttgattttaattttgatttattaaactaacaggtagcgtataaacactttctaatgaaacagagggatcattaatttgacgtaaaagtaaatcgcacattaattcagcaatttcttttgtatgttgccgagcactaattaaatttggaaaaagactttgaatcaaatgactaccatcaaatcctgtgattaaaggtacttttcctaaataatcagcacattctttagctagtaaagctgtaatgtcatcggtacaacaaattgcatcatatttgtcatcctttaaaaattgaaggatggctatttttttagcaataattgagtcactggcactgagtgagcgaagatcgaatttagaatcaaaagtgttaaatacgcgaatcattcctttgattcgatcacttattgggtaatagtcttctttagcaccagcaataataataattttctttttcttttgttttagaacagattgtgcgatttgcatacctgcgtcatagttattagattgaacagttggtatttgaggactaattttacggtcaaagctaacaataggaaactttatttttagtccttttttaggaatcttaataggagagctggtgatcagtccagcgatttccttttgtttaaatcgctctaaatagtaattaatatcttgggattgatagtgatctagatgaagaatacaatcgtatcctttttcctgtaaataaaaggctagatattcaaataattcagaataaaaaggatcccggatttaaaattgaagtgcaacactaattgttaaacaaaaaggccatgaagacctaaacttgaagtgaccaaaaatcaagaaaggaagatcttcatgaccaactcaaattctagcatttccaagcattatcatcaattgaacagcgaacaacgtggacaaattcaagctctgcttgattctggcataacctcctgcactgctatcgctcaagaagtaggctgtcataaatcaactatcagccgtgaaattagacgaggcagtgtcctgcaaagagacagcagctatgtcttgtatgagcactattacgctgatactgcacaaatttatcatgaaaagcgccgcagaaactgctataagtgtaatccactgcaacactatgccgtctttttcagaatgctaagcagacgctttaaagccaaatttgatgccaccagcattgatgaattcgttggtgaatttcacaggattatgccaaattatccatgtcctagcacgcccactgtctatcgttatattgatcaaggattgctggatataagcaatatcgacctgccaatgaagcttaaaagacgccgaaacaaacgccatcatagtcatggtggccatgctccgcataaaaagaatcttggcaattcgattgaacagcggcctaaagaagttgaaaacagaaaagtttccctgcactgggaaggcgatttggttaaaggcgtcagacgtaaaaatcaacctgccttaatgacactgactgaaagaaccactcgttttgaggttgttatcaaaattcctgactatcgggccagtacttgtcaaagactgcttcaaaaggagattgacagacatcctaattggtttaaatcaattacgtttgacaatggttctgagtttgcggatatgaccaaaatcaaaggatgtcagatctactttgctcatccatattctccttgggaaagaggcacaaatgagaactgcaatggacttctgcgtcaattcttccctaagggcaaaagcatgaaagataagtcagctgcttatgttcaacaggcaactgatgccattaaccgcaaacatcgtcgaatcctccaatatcacacagcagaagaactcttcaagcaatacgttccttcatagcctaactgttgcacttaatttgacaattcaggattattttttattaaatcaaaataaggaattatcaacggaagaattgcttaatcatgtttggaaaaatgatcttgatgccaatagcgaggtagtctggatctatgtttcatacttgcggcaaaaattgcaatcaattcaaagctcagttcgaattgaaggcgataaaggtggttcatataagctagttaagtaggtgagcagatgattcaaaaatttcggtggaagtttattggtacttctgttgctgccttgtttgtagttttgttgttgacgttaggcggcttagtttgggtgactcatgttcaaagccaaaatgaagtcgatcgcgtgctaacggctttggtcaaaaatgaagggcgcttgtcaccaaaaaatgccaaaccagcctttggcgatcaacatgatccaattaatcgcaattttttaggtgggcagtataatcccgaagcggtttatcagtatcgctattttgcggtaacaattgatgaaagccatcaggtacatgtaattaatgataataacgtttataaaattaataattccaagatacagactattaccagatcagctttagaaaatggtgataaaagtggtgtagttgccttaggacaaaatcaatatgcctttagggttgtaaaaaattctactggtgaaatgatgattgtttttttgaatgaaactctgatttttaaccgtttttggttattatttagagtagcgttagttttaggcttaggcgctttgattgtctttgctttagttttgattttagtttcgggcaaggcaattaagccaacgattgatgcttatcacaagcagcaggaatttattaccaatgccggtcatgaattaaaaacgccactagcagttatttccgcgaatacggaaatggaagaaatgctgggcaataattctgaatggaatgaaagcaataaagagcaggtggctaaactaactaagttaatcaatcggttgatttcgctggctcgagctggcgagacgggtgagcttaccttaagcaaagttagcttttcagaaatcgttgaagaaacgactaaagattttaaatcagtcatgaagaagaatgacttagtctaccaagtatcggtgcgggaaggcttaaatgttttagctgaaaagcatactttagccgaagtagttaatattttgctagataatgcgcaaaaatattgtgatcctcatggcaagattcaggtgaaactgactaagggcggaactttaagcaaatatgcggtcttgcgggtagaaaatacctatcgtgaaggtaaaggcaaagattacagccatttctttgatcgtttttatcgcgatgatgagtcgcataattctaagaaaggtggcttggggattggcctggctatggcgcaagagttagtcgaagcctttcatggcaaaattttagcccaccacaaaggtgaagacattgtttttactgttagtttaaaaattgctaaatgatcattctgtgatagttgtataattagaacagaattgggggatcattttggcgaagagaaaatcaatttataccaaagatgttgtcctggttatggcagcatctttcttttttatgtttagtacaatgtttgttaatcctttgattaatggatatgctaaagaattaggcgctagcagtgcttttgctggaatcattgtcgggattatgagtttagcagcaatgtttttgcgaccggtagctggcaatttaaccgataaattttctaaataccgcttatcgtttattggcggcgctttaatttttgtaggagtaatgggctacgttttgactccgtcaagtggttggcttttgctctttaggttaattaacggcaccggttatgtcctgtgcacagtttgtatgactacctggcttgcttttttagtgccgcgccaacacgttggtgaagcaatgggcttttatggcttaatgaatgctttggcaatggcgttagcaccagcagtttcaattaatatttatcaaaaaataggttatcgcacaagcttgctagcatcagctgtttctgctttattaatgattgtggccattcagtttgtgggtgatcatgctttgcctaaaaagcgagttcgaacgcagaagaagagtttcaaaattatccagtttaatgttttaccggtagcaattttgacaactttatttgctatcccgtattttgtaacacaggcagatattgtaacttatgtagaacaaaaacatctgactgtcgcagttgggtcatatttcttgatctatgcggttgttttgttgattattagagtaggactaaaaaggtattttgatacagtacgttttggcgtctggttttggctaagtctagtttcaacggctgcttatattatcttgctcgcaataatgaataatgattggcaaatggctttagcggcagctttaatggcatcaggctatgggatcatttattcagttttgcaatcaactgcgctgttgttagcaccgattgaagaacaaggcttagctagtgctaccttttatttgggactagacattgcgatggcctttggcccaatgatcagtggtgtaattgattctgctttaccgatagaatggttctatccagtagaattagtcttagttccattgattttagtagtttatttcatttggcgtaagcgtttgaatggcgcaattgaccatcattagagggaaaatatgagcgaatatgtagttaaatctaagttagaagataaagaatggcaaattgccaaccaagtacgtgatcatgtttttgtttgtgatgatgttaaacatgatgcaggtcccaacccagttgagtatctatgtagtagtgttaattcatgtattgtaatgtcggcagggatgattactaaagcacatcaacttgatgttaaaaattttagggtagaaaaccaggcaaaaacggagaatctcggtcatggtaaatcagtagtaactgagatgaagatcaaggtcttctttgattcggcaatgactagagccgagaaggaagaatttttagctcatactttgcatgtttcaactgtttatcaaactattaaagcagctgtcaaaatttatgtggaattaggaaaataagcgatgagcgagccatattacaaacaagaataccagggtgaaagaaagttagatggtgaggccccagtttttagttttgatcaaattatgaaagaaacttttctgcgaccatttatctggaatgcaagaactaccagaagaagtttctggattggaatcgttattactgaagttataatttggattggtggaattattacatttttggcaactgttatgccagtttctcactatgagaatgattcagctgatatgataaatggttttgcttttaatggtgatcacgcttcgatgattgtcattatcggtatgattatttggggcttgatctatctttatttgaaattatgccaattaggcctagccgtaagaagattgcatgatatcaattatacaggttggtggattctgttaatgctgataccgttaggttggatttttgttctgtattttgcaattcagccaagtaaacaagagccggtgaaatggggaacgtatctttaccttgacgaataataaaaaatgttataatttaactataagagattacgttaggagattatatcgatgaaaactaagaatttatttacttcattagctgccgcagtgatgctttcagctggtttagctggtgcaggtgtgtctgctgcagaaccagttcatgcagcaactacacaaacttcaagcaaaaaaggtaccattagtattaagcgtagatcagtatcagctacagttaataatgctaatcctaagctttacgctgtaaaccaagatggtaaaatcgtaaagtcaatggattcaaattatactaaaggtcaaaccatccagctttacttttctaacgaggctaagaacgatcaaggttctgttactttctattatgttgacagtcaaactgtagatggacaacaatgtgcaatttatgttgtttcgactgatgttaccccttcagcaacagttccaagtcaagcagactggtcaaagcaagcacaaagtgacaaaaaagccattcaagatgcttacaacaatagagcattaaagtacatcgttgtttcacctaagtcaaaaaagggtgcaaagatctactacgcatataagaagagtgctaaggctaaaaaggtttactttaaggcaaccaagaagaagatcaagtacggtaagaagtacaagtcatcgatgatcgttaaaaacggtaagagcagatatgcttatattggtaagaagagatacttaaagacctctactattaaagtagtaagtgttaagtacgcaccagttcaattatcagatgatttgaagaacttaattgttcaaaactagaaaaagttaataaaaattgtagcgtaaaggatgaattattgtcctttacgcttttttgatctaaaaattaataataataatattgataaaaaaactcactgacctacaatagactttgcgttatttttagggagttgtaaaaataagaatgaagagagtaaaagtctatttaggattagcttgtttgatgacgttattatgtttgaagccgcaaatggtttgggcgcgagaactaaatccatttcagactaagatgattaatccgcatacgtcttatagaatttatcaaaacttaactcgtaaaggtccgtcaagaagtctatgccttgctaatacgtttaaacatggcaatgttcaagccagtgcagttagaaaagttcgcggcaataagtattgctatgtttggttagacggacatagaggcggttgggtcaatcagcgagcttttttaagaagaaaaattgcagttgtacatcagattagtttagtgaagaattcgcattatagttttccaactagggatgcgattaattatgcaacagatgcagcaggaacgataattgagccaagtaaagttaaagtatctcgagcagaagtttcatcaagtaaaaaggaaagctatcgggtaagttattcttatggtaaagctcatgctcagacagttgttcaagtgagagctaatgctagagagggcattgttaaagcaaccaaaaaaccacaagctggagacagtgctcgtagctggttcaagcactataagacgtctggtaattggggcagaagttttgcgccggaaactaaatcgcatgttttaaaaagtgttcattttaaactgaaaacctatttctatcaacctgcgactttatgtcaaagtgattcggtaactgggacggtgggactagtaccagaaggattgaccgtgtcaaatggttcaatgtatgccacaatgtatcattcacctaatgatacgcgtgctcacattgtttcttacaaatttaatcaagtgcctaatcgctatactatgcaaaagttgccatggctaccttggtcacaatttctgcggcttgcatcccatgttaagataagcccatatattaaattgggacatggacaagcaatcggttcaactcgaaagtatatttatgtgattgctaataaccatttattgcgcaagagctctcaatcagaagaaattatgcagattagtaaaaacaatttgcaaattaaacagatttggacttttaaagtttggaatcattcagctagaacaggtcgttatttccataatgctacttttgtaaatgatcaccaatttattgccgtttaccatgatgccacagaccaccgttttgaatattgggaagttactcgtcagggtaatagttggtatcctaaagagattggcgctactagaggagattttatgcgcaatgattctcccgttcaaggaattacctatgacaagcataaaaaacagatttatttggcctttaatgattatttgtttaaattgaaacgctcaggtaaagtgctggctagaggtcactttcatacagggcgtgaatttgaggggattagcataaatggtcgtcatttatacgcagagctggcgcaaaggccagaattgttgaggcagaggataagataataggtgtaaaaatatgttatacccagataaattctatttaacacaagatttaaatagaagatttgccagaactaaccttgctcgactaatatttagtgatttgcattttgagaaaacaaatatttctttaattcaaacacaattagttgctgatgggttaaatatagagagggcttccgagaaagataaggaaagaattattcgattaaaacgagcatggcaatatattattaatgaaaataaggtgttatctttagatattgaactaaagatacatttattactgacaggctatggcttccgagataatctaaactacaaacaagaagaaaaatttttcgatgagttaatgaacaacgatacctcgactacagataaggcaatgacattgatgtatcataatatgcgtaatcaattattctggggcggaaataagcgtactgccacactagctgcaaataaattaatgattgaccatggagcaggtttaattaatgccccacttgataagtgggatagatggaacaagctgattagtcaatattatttaaccggcaaaatgaatatgttaaaagattggacctatgaaaatggcattcaaggagtagtgctgaataataattcagatttacctaaacctgatattaatccagaagattatgattaattacttaagcagaccgaataggcctgctttttttgtgtgcaaaagctctttttgaaaatatcatgataaaagttcataatagaaattgtttgtttatgttaaaggagttgttttattttttatgaagaataatgatcacgttaagataagtcctagtagtcttgtcttgatgattttttcttctatttttggatttagtaattcactgacagctttttatcaaatgggttattcaagtatcatttggtatattgtcacagctattttattcttcctgccatcagccttaattttcgctgaatatggtgcttcctttaaaggaattaaaggtggaatcttttcatggcttgaaggatctactaatgaaaaagtatcatttatcggaacttttatttggctggcagcttgggtaatttggttagtttcatcaacccaatttttcttagtttcagtttcaacggcaatttttggtcatgatactaccccaagctggcatttagggtcgctgacttcaactcagttattaggtgtgttggaagttattttcttagtaattgttacattttgtgccgcaaagggaattgataaaataaaggcgattaataatattggtgggatctttactttaggaattgccattggttttacagcagtttcactttttgtctttattttgaatcatgggcaattagctgaaccagtgaccgcacaaaatatggttcattcacctaatccagcatttcagtcaccgattgcggttatttcatttattgtctatgctttatttgcctatggtggtctggaaacaacctcaggagtaattgattcagttgataaaccggaaaagaattatcctaaggctctgattacggccatggtcttaatgacagcactttatgttgtaaacatctttatgtgtggggtggctgttaattggaacaaatcgttaggtggtaaaggtgttgacttagctaatgtcgaatatgttttgattaataatttaggtattgtcactggtcatagcctaggtctatcacattctacttcactggcaattggaactgtcttttctcgtttggccggaattgcggatgtgttatcaggaattgccgctgcctttttgatggtttattcaccgattaaatcatttattgaggggtgtgatccgcgactattgcctaagaaaatggttaagttaaataagcacaatatgcctgaattctcgatgtgggtacaagcaattgtggttagcgttattatcttatttatttcatttggtggtaatggagcacaacaattctatacaattttaatggatatgatgaatgtttcttcatcagcaccatatttatttttaattgctgcttacccattttttaaagctaaaaaagacttagatcggccatttgtttttattgaaggtaagaaaaaagtttgggcaacgacaattgttgtttggttagtggttgcggtcggaattatctttacttgtatagaaccactctttaccggagactggcaaacttcattctggacggctattggtccagtggcctttggtgttattgcttggatttattacgcatataatgaacgaaaagaaaaagcaatggcttaatacgcaaaataagacgaaggattttgtccttcgtcttatttcttttctctattttttactttaagccagctactctgacaacatcacgttcaatcattaattcctcattagttggaataaccataccaacaatagttgagtcgggcttggtaataatggtggcattttctttattagcggctgaatcaggcttaaggcctaaaagttcgagtgaatccatgacatgttcacggacaccaaagtcgtgttcaccgacaccagctgtaaaggcgataccatctaggccacgcatttcaagggtataagcaccaacatagcgaatgattcgattaatgaaaatgtttctagctaagtcagcacgcttcttcttttccccttcgagcttagtcatgtcaccacgtaaatcacgcatatctggtgaaatgcctgaaattcctaacaaaccagattcgttgtttagaaccttaagcatttgatcagcatcaagattttcctttttcatgacaaaagcaagtaaagaaggatcaacatcacctgaacgggaactcatcgtaatacccgccattggtgaaaagcccattgaagtatcgaatgatttaccatctttcacagcggtaactgaagcaccagatcctaagtgacaaacgattaatttcaagtcctttaagtcgcgtttcataatttcagcggctttttgactaacatatctaaccgaagtgccatgtgcgccatattttcttgcaccgtatttttcatagtatttatatggaagtgagtacaagtagtgcactggatccaaggtttggtggaatgaagtatcaaagacagcgacttcagggacgccaggcaatactttcatgaaggcattaatgacatcggcttcagcggtattatgaagcggcgcatattgtttcaaatcataaatcttttgtagtgacttttcatcaattaaggtggagtccttaaattcttcaccacccgcaacaattcgatgtccgattccgatgatttctttaggatcgtcaattaaatcatacttttttaaattttcaagcaagattgtaacggcagtttcggaatcaggaatgtcaactttttcttggtgtttttcacctttaaccttgattgtaaaggtggagccgttaagcccaactcgatcagccatcccttcgctgataactttttcatcaggaaaggtgaaaagcttaaatttaaaagaagagctacccgaattaatcgctaaaatttttttcataaattatgcctctttttcttaatttttgcagtgcaacctatccagtaagggcatgcaataaagaaaatgccactaatctgctttaagtaagttcttgcagtaatagtgtcaacgtctttattatacaacttttgctgtaagctcttacagatatgaaactgtcaaatcttttgtgtaaatagatctttctcgtaaattgattttttaattatttatttaatcaaagtaggattctaaggtgtcctgaacctgaccaaagcctttatgaattcgattgaaataacggtcattgtagctcattgcctgaatgccaataaaagcatcaagcgactgttcagttggaaactctgccttaggcttagctttgcgcttgatcacattgttaaatgattcaatcatgttagtcgaataaattgaagctctgatctgcttgggatagttataaaagaccagcagatctggttctatgtctttcaagcttctgataacatggctgtaaaccttgccccatttggtatagaagtcatgcaggacagctgtggcttcttctttgtttgtctgttgatgcacctgtttgaattcgttcatgatcttttcacgatcgtcgacgcgtactttagcgcagatattgcgcatgacatgaaccaaacagcgttgaaaatgagctttaggataagtcctggccaaggctgttttcatgccaacaacaccatcagaaagaaaaagctcaacttgctttaagcctcgggatttcatgttttgaagcatatctgtccagacttcaatgttctcgctaggcgcaatgcagtagtcaatgacctccttgtgcccattaggcttgatgccaatggcaatatagactgcttcacgctcaaatgtttctcggcgcaaaggaaggtatgtcgcatccaaatagacgcagaaaaacttgtcgcttagcttgcgtttgtggtaagcctcaacctttggaatcatctgcttggaaatatttgatacctgagctggactgtaatggctgccatacatcttttcaattagatcggctatttccctggtggtcacgcccttggagtaaagcttgataatcatgctttccaagatatccgagtgctgcttgtagccaggcagcgtgtgctgatgaaattgaccgttgcgatcccggggcacttgcacttcaattgggccaaattgcgtatcaactttgcggaaataagcaccatttctagagttgccagtattccagccatttctggcatagggatcatagcccagaaaggcagtcaattcagcttctaacaagttattaacagcctgttgtagctctttgcgcaataaatcatttattttgtctggattgaatagagcttgagcaaaatctttggtaaaatcattcatgaaggagttcttctttctgtatgtgtttttttgttcaaaccaatcatacgagaaaggaactcctttttctaatgtttaaagaaataaatttaaggaatcattcatccttacacaaactattttacagtctcacagatatttttttattactaaaatttatatataaatttgattgatcatatataaatttagaatatcaatttgcaacaaaaccgcttacaaactataatgaaattaacatacaatatatattgagaggagaaaaacgaatcaagatggtgaatgtggatgaacttgaagaacgtgttaagaaggtaatgccagaaggtgcatattattatattgcttcgggtgcagaaaatgaatggacctggcgtaacaatactgctgcttttaatcattttcaaattgtacctcgtgctttgactgagatggctgatccgcaaactgatactgattttatggggatgcacttaaagacgccaattatgatcgctccaattgcttgtcatggaattgcacataaagatgcggaagtcgcaacgcaaaagggtgctgctatggctggtgcgctctttagttctagtacttatgctaataagagtgtagaagaaattgcagctgcagctccagaagcaccaaggtttttccaactttatttgagtaaagactggaattttaatcagatggtttttgatgcaattaaaaaagctggttatcaaggcattttcttaaccgttgatgctttggtatcaggttatcgtgaagcaaacttgcggactaactttacttatcctgtaccattggacttctttaagcgttaccttggtgcaaaaggtaaaggtcaaagcgtagctcaaatgtacgcttcttctgcgcaaaagattggtcctgaagatgttaaaagaattaagaaagaatcaggtttgccagtctttgttaaaggtgttatgtgtgctgaagatgcctataaagcaattggagccggtgctgatggaatttacgtaactaatcatggtggtcgtgaagttgatggtgctcctgctaccattgatgttttgccagaaattgcgcaagcagtaaatcatcgggtgccaattatctttgattcaggtgtccgtcgtggctctcatatctttaaagctttggctttgggtgctgacattgttggaatcggttgcccatatctttatggtttagccttaggtggtgcgcatggagttgcttcagttattgaacaattaaatgatgaattaaagattgatatgcaattaacgggatgcaagacaattgatgatgttaagcatgctaaattgacgcacattgcttatactgctgataatttgccatctaatactgatccaagcagacgcaaggaatatccggtaactgacgaaaatcaagttaagcaaactgatgcggtatctggtgcttctaagttagaaggaaagccagctccggaaccagagactgataccacaactggtgcttcagtaagataaagcaaaaatataattaatattttcaatatgattgtcattgaataaatgatagtcatatttttttactatcaagaactcagcggctacaatcaaggtgaaagcgattcgatttttggagaggaaaattaaattattgaagagaataatgttttgactgatactgaagagcttaaaatcttgagtgatcttgttgcaataaaatccgttaatgataatgaaattttagtagcaaaatatttacaaaaactattaggagaacatggaattagttcacgtttgttggaatattccacaactcgcgcagatttatttgctgaaatcggaacaggccatcccattttagcaatttgtggtcacatggatgttgtttcaccaggtgaattagatcaatggcatactgatccctttaaattaaccaataaggatggtaaattgtacggccgcggagcgactgatatgaagtctggtttagctgccttggttattgccatgattaatattcatgaacaccatttaattaagcatggtagtatcaggctgctagctacttttggttggtgaaccttctggctacagtattgccattgctcataagggttcgatggatactaagttaacttcccaaggcaaggaagctcatagctcaatgcctgaaaagggttataatgcgatcgatccattaatggatttattagttaaggccaacaaggcttttagagaaacagataaaaacaatccagacttaggtaagttgacgttcaatactactgtttttactggcggggaacaggtcaacatgattcccggagaggctaccgcgcaaattaatgtgcggactattcctgagttcaataatagtttggttgaaaagaaattaactgaattagttaaggcagaaaatgcgcaaggagctaaaatcaaaatgtacatctatatgtcggaaccttcaattaaaactgacggtaagtctgaatttgtaaaattagcccaaaaaattggagcaaaatatgcggaaaagccgattccaacagttgctattaaaccagtaactgatgcttcgaatttgattgccgacaaaggacctagctatccgtttgccatgtttggtcccggtaatgacacgccgcaccaagttaacgaatatgttgatgaaaagatgtatttgaactttgtgaagatctatactgaattgtttgtggcctatttgaataaataatttggaaagtaataaagagcctaggcaaaattttagcctagacttttttattgtattttgaagtattctttagccgcatcactcatccgttcaggggtccaaacaggataccagacaaattctacatcaacatttttaacttcagggacttttttaacggctgttgtaatctgcttgatcaaataatcagtcaaaggacaggcaggtgtagttaatgtcatattgatgagacagatcccatcttgatcgaggtcaatttcataaatcagccccaagttgaccacatcgacgtttaattctgggtcaataacttgagctaaatgttcaataatatcgtttttaattgttttgctatcacgcattgtgttacctacgcatctttaccaaaaatttttgctttaattgcttgacctgttggtgtaccagctaaaccgccgattccagtttcacgcagagatgccggcatttgatgaccaactttcttcattgcttcaatacattcatcagctgggattacacttgtacatcccgctagcgccatatcagctgcgataagtgcattaccagcgccaataccatttcttttgacgcagggaacttcaaccaaaccggcaatcggatcacagactaacccaagcaagttagacatcgcaatcgataaagcttgggcactttgttcagcactgccaccagctacttcaactgccgcggcagcacccatggctgaggcactaccgacttctgcttgacagccgccagttgcccccgcaatttcggcattattggcaatcaccatgccaaaaccgccagcagtaaaaagaaagcgaatcatttgctcttcgctgagctgtaatcttttttctaataaaaatagaacgccaggtaaagtgccggaagaaccagccgtcggggtagcgcagacaacgcccatcgctgcattgacttcgttagtggctatggcattttcaactgctgccatcattgtatcgcctgaaagtgtgtgtcctttctcgcgatattttttcagcttaattgcttcgccaccagttaagccagtttttgaaaagacaccgtttccagattcacctcttttaacggcagctcgcatagtttgcaagttatatttcatgcgctgccagactttttctcgtggcaagcctgatagttgacattcttgttcaataattaattcagaaataggtttgtgcgttttttctgctgcagcaacaatttccttaatatggttatacataatattgccctatgttataaacaaataatattctcaaattttttatttagttcttgcaataaatcaggatgaagataattttctacatcatattcataaatattatagtttttagtatgaaaaattcgtttgcgactaaagggtgctttttcgtgtaagagcgcggtaagctcttgttcaatgcgaatatttttgtgtggatcaactaaaataataataggtaatgcaccagcaggttgaatctcggtattatgtaagacaattttgcgaatttcaattgcaccaccaccgatagagcatccagccaattccactttctttttatcattagacatatttaaaatagcagtattagggtgaccaattgggctaggaccatcttcttcaacaaaacgtaaatctacgccgcgctggcgtgcaatctcaggtgcctttggtacgcgtagatcgtctgagtcaaagcctaaaatacctgccgcaatagcatagtctgttccatgaccacggtgagtttgggcgaaagagtcgtaataatgaacggtaactttactcggggtaccgccaaaaagtttgtaaccagcgcgtccaatagcgacggctccggccgtatgtgaacttgatggtcccaccattacggggccaataatgtcaaaaacacttttataccgattagtcattttaatccctgctttgtaagttattctgtttttaattataacgaataataaagaagattaagaaagttttttggagactgtaaaatagtttgtgtaaggatgaatgattccttaaatttatttctttaaacattagaaaaaggagttcctttctcgtatgattggtttgaacaaaaaaacacatacagaaagaagaactccttcatgaatgattttaccaaagattttgctcaagctctattcaatccagacaaaataaatgatttattgcgcaaagagctacaacaggctgttaataacttgttagaagctgaattgactgcctttctgggctatgatccctatgccagaaatggctggaatactggcaactctagaaatggtgcttatttccgcaaagttgatacgcaatttggcccaattgaagtgcaagtgcctcgggatcgcaacggtcaatttcatcagcacacgctgcctggctacaagcagcactcggatatcttggaaagcatgattatcaagctttactccaagggcgtgaccaccagggaaatagccgatctaattgaaaagatgtatggcagccattacagtccagcccaggtatcaaatatttccaagcagatgattccaaaggttgaggcttaccacaaacgcaagctaagcgacaagtttttctgcgtctatttggatgcgacataccttcctttgcgccgagaaacatttgagcgtgaagcagtctatattgccattggcatcaagcctaatgggcacaaggaggtcattgactactgcattgcgcctagcgagaacattgaagtctggacagatatgcttcaaaacatgaaatcccgaggcttaaagcaagttgagctttttctttctgatggtgttgttggcatgaaaacagccttggccaggacttatcctaaagctcattttcaacgctgtttggttcatgtcatgcgcaatatctgcgctaaagtacgcgtcgacgatcgtgaaaagatcatgaacgaattcaaacaggtgcatcaacagacaaacaaagaagaagccacagctgtcctgcatgacttctataccaaatggggcaaggtttacagccatgttatcagaagcttgaaagacatagaaccagatctgctggtcttttataactatcccaagcagatcagagcttcaatttattcgactaacatgattgaatcatttaacaatgtgatcaagcgcaaagctaagcctaaggcagagtttccaactgaacagtcgcttgatgcttttattggcattcaggcaatgagctacaatgaccgttatttcaatcgaattcataaaggctttggtcaggttcaggacaccttagaatcctactttgattaaataaataattaaaaaatcaatttacgagaaagatctatttacacaaaagatttgacagtttcgttttttgcaattttaaccgaagttttgtcataataatatgaaaagtgaaagaggttggttaaatgactaaagaaaaagcagaattaaaacaaaatttggagcatctagctgagcaaaagggcagccagcaggcagtttcttatcaagacttgtttacaccacaattgatgcaaaagtatactagttttgctactattgacttttttgtcagagaattgggcgtgaaagactttacgcaaattgagcagatggcgatagatcaagtcgatgaatttgttaaaaaagagaccaagtttgctagctgggaagaaatgcaacaaaaggcggttagcgagtacatgatgaagttattttagcaacaaaaagcgagttagtattaactttaaaactaactcgctcttttatttactatgttaggtgaatgacttgagcacctaattcatcaataaagcgctgatcatgttcaattactagaatagtaggatgatattttttaattaattgaataatttgttcttggttaaagacatctaaatagttcaaaggctcatcccaaagatacaaatttgctggttcaagtaaggacttggctaagtagatctttttttgttggcctgaagacatttgattaattgaattagtgaatatatcacgttcagtacctaatttgtgtaagatattgagaaaatcggcatagttaaggtggtgcttttgggcaaaatcttttaatgataggttattagattgttcaatctgtgataaataggagattgaaatcttatcagctgaatgcaatttgccagtaattgttccagcaaaagtattagtaattgccttaaacaaactagattttcctataccgtttttaccagtaatcacaaattggtgaccacgcattaaatcaaaggtagtaggttggaaaaggggaagcttgtcataagcaaggctaactcctttagcagtaattagatgtttatgatggtcggggacaaaattcatagctaggtcattgtctgcttcaatattttttaaaagaccttttctttcttcgatatttttatctaatcttgcttctacatttttggcaagtttcatttttttggcggctttgtgtcccatgaatcctttatcataaactgtacttctatgtcgaatatcgcctttcatcttggctcccgcatttttgttgctttcggaacgctgggcaaaagtttgcatcttttgttgactggcatggagatttttaatttgcttttctaactttgcattataagcgatattagattcatcctctaattccttttgtttttcataacgagtatagtttccttgttccagcctaattttttgcatttcaattgctagggtgtgatcgacaactttatctacaaaatttcggtcatggctgattacaattaatccttgttttttattatgcagatattgtgctacttgatttcgtgtatcttcatcgaggtgattcgttggttcatctagtagggcaaaagaatgttgattaataaaacaaagcgccagtaaaatttttgtttgttcaccgccactaagtgttgaaaagggctgccaaatgatatcttctttagcatgaagcagatttaattctcgttttaactcccattcctcaaaattaaactgttcttgtaaagcataaatagtaaggttatcgggatcattaattacctgaggatagtaattgaattctaaatcactttgaatagttccttgatattcgacctgttttagcagcattttcataaaagtggttttgccgcgaccattacgaccgattaagccaagtttccaattagaatcgagatttaggtttaaattatcaaaaattttatcctgaccgtcataggcaaatgaaacgttttttagtgaaattgtagacataaaaaagcaccgtcctctcaaactgtgcttatgatctgagaaaatggtgcctgatagattagtccaagttggctaatctataattattcttaatttaaattaaagaaaatcacgcagactaatttctgatcacaagcaaaaagtacatccttaaactagtagaatgcattattttttacttaacgaaaatcagaaattaaaaacgcatcggcgtgattcctcctattacttgaattgattaatctggcaatactttaccatcaaatataattatttgtcaatatttttatgataattcatttgcaagctgtgattaataaggagactgtaaaatagtttgtgtaaggatggatgattccttaaatttatttctttaaacattagaaaaaggagttcctttctcgtatgattggtttgaacaaaaaaacacatacagaaagaagaactccttcatgaatgattttaccaaagattttgctcaagctctattcaatccagacaaaataaatgatttattgcgcaaagaactacaacaggctgttaataacttgctagaagctgaattgactgcctttctgggctatgatccctatgccagaaatggctggaatactggcaactctagaaatggtgcttatttccgcaaagttgatacgcaatttggcccaattgaagtgcaagtgcctcgggatcgcaacggtcaatttcatcagcacacgctgcctgactacaagcagcactcggatatcttggaaagcatgattatcaagctttactccaagggcgtgaccaccagggaaatagccgatctaattgaaaagatgtatggcagccattacagtccagctcaggtatcaaatatttccaagcagatgattccaaaggttgaggcttaccacaaacgcaagctaagcgacaagtttttctgcgtctatttggatgcgacataccttcctttgcgccgagaaacgtttgagcgtgaagcagtctatattgccattggcattaaacctaatggacataaggaagtcattgactactgcattgctcctagtgagaacattgaagtctggacagagatgcttcaaaacatgaagtccagaggcttgaagcaagttgaactctttctttctgatggtgttgttggcatgaaaacagccttggccaggacttatcctaaagctcattttcaacgctgtttggttcatgtcatgcgcaatatctgcgctaaagtacgcgtcgacgatcgtgaaaagatcatgaacgaattcaaacaggtgcatcaacagacaaacaaagaagaagccacagctgtcctgcatgacttctataccaaatggggcaaggtttacagccatgttatcagaagcttgaaagacatagaaccagatctgctggtcttttataactatcccaagcagatcagagcttcaatttattcgactaacatgattgaatcatttaacaatgtgatcaagcgcaaagctaagcctaaggcagagtttccaactgaacagtcgcttgatgcttttattggtattcaggcaatgagctacaatgaccgttatttcaatcgaattcataaaggctttggtcaggttcaggacaccttagaatcctactttgattaaataaataattaaaaaatcaatctacgagaaaaatctatttacacaaaaaatttgacagtttcagattaaatttcttcactactcaattcaaacatattaataattgatttaaacatagataaaagttgtttaactattaaaaatgaattttgtgaatataatgttatcgataacagaaatcatttttatattgcaaatgaaagcgcatacgtttattgttgaatttgaaaaaacatgattttgtggaggaatttatttatgaataaaaagagtggtcataatatcaaatttaaatcaatttttgtatgtacttcagctattatgagtctttggttaggggcaaacttaactacgactcaagttcatgctgcagaagacaatgcagctcctaaaagttcagaagttgtaggccaaacgaattctagcaaagataatgcagctactgctactgtacaaaatcaaagtaacgcaaaagcaaagcagcgtcaacaaggtgtagctcctcaaaacgttcctacagttttggcagccaaaactaaagatgagggaacaaataactctccagcacgtgaggaagttaaagatcagactaaagtagttattcactacaatggtgatggtgaaaaatgggttccttatatttggggtaagaaacctaatggtaacggcaatgaatacaaatgggccggcaaagatgataatgggtattactcggttattgatttagataaaaactatgaccaagtaggagttttaattaaaaccaaaggcagttgggctggtaaagacggtacaggtgctgatcgtagcttaaatgttagcgataatggcaaagcggaagtcttctataaagcaggtagtgatgatgcccaaaaggtaacaccagagtaccattccgcaaatataaatttgcattattacggtgatgaccaagttaataaggttaatgtttggacagataaggatcaagataataaacaacttattagcttaaccaaacaaggcaatagtcaagatggctcaatcaaattagacaatactgattttagtaaactttttgttgcgccagttggttctgatgaaataacaagagaattcactccgttaccgggtaataaggcgacagatatttatttagttaaaaatgatacagaagcttattatagcaagagttttgccttagctgatcaaagtctatcttctgcatatatgacttcaccagatagtttgactgttgaagcaggtaaggctactactgtcgataaaattaaaggaaaacttagtctgcgaaataatagtattgatcatattgaagcagtcgatgctaatgctgatggtaaagcaaagaaatttattattcataccaaaacagatattgatattttaaaggataaccaagttggactagggatgaactttaaaaatgttgatatcggtccttatgttcgttccaaagcttttgacgataaatatgcctatgatggtgacgatctaggctgcacctatgatagtaaaaagacgcaaattaaactctgggctccaactgctaaagatgttgaattgaatttatatgatagtgttgataatagtgccaagcctacgaatgttattgctttgacaagaggcgatagaggtgtttggactggtattattaagggcgataaaaaaggctgggcttatgattttaagttaacttttggtaatggcaaaataacacagactgatgatccatattctaaagccgttactgtcaatggcgttagaagtgtaattgaagactacaataatatcaaaccgacagattttaaccgaatgccttcattctctaagccaactgatgcaatcgtttatgaaatttcaattcgtgactttagtagtgatcctaactcaggaattaaagataaaggtaagttcttagggatgattgaatcaggtaagacaccaactggacaagttactggtttagactatctcaaggcattaggcatcactcatgttcaaattatgccttcatatgatttcgctagcattgatgaaactaagagtttaaagaatcaatacaactggggttacgatccaaagaattatgatgtgcctgaaggatcatattcttctgatccaactaatccaactgctagaattatcgaaatgaaagaaatgattaatggcctgcataaagctggtattagggtcattatggacgtggtatacaaccatgtttataatcctcaagagcaagcttttgaattaacagtgccaggatattatttccgttacgatgctgataataataccacaagtgatagtggctgcggtaatgacattggtagtcaacgtaaaatggttcgcaagtacattgttgactcagtagtttactgggctaagaactacaatctagatggcttccgttttgatatcatgtccttactagatcgagagactatgaatgatgttagagctgctctagataagattgatcctggtattattacttatggtgaaggctgggaagttggtaaccagaaatatactagagaagaaggaacgacccaatacactgcggataaagttcctaatgttggtttctttagtgatgatatgagaaactcggttaaaggtaataatgatggctccgaaccaggattagtaattggtaacggtaatgaaaaaaactttgataagcatgctgtcttgtttaccgatagttttttaagaggtaaatggttacataatgattcttgggagccacataactatgcaactccaagccaaatggttaattatgccgcttgtcatgatggtaagacgttgtatgattacatcaaggctgcaatgccaaatgaatcagatgagaatattgccaggagagtaagattggctaactcaatgatcatgctttcacagggtatttctttcttccactcaggtcaagaagcattaagaactaaaggtggcaattcaaattcatataattcaccagtaaatattaatgaaattaattgggaaagagttggtgctaataaagcatcagtccaatatttccaaaaattggctaaattacgtaaacagctgccaattttgcatttgaatgatttcaataagatttatgacgagaatgttactaaaattattagttatggtagagaaaccaaagataaaaacatcaagggtgtatttgagtacgaatataatgttaatggcaagaagttattaattgtctttaatgtcaacaatgataaagttgctctaaataatgttgatttatcacatggtaagaaattgttagatagtgatggcaatgtgaaattaagtgataaaactatgctggcaccattaagtacacttgtagttgatgaagatggaacaatggttttaccagacgtgccaaaaccagatcagcctgtaagtccaaccactccaggtgataagccaggtaaaccaactacaccagaaaatccaaggattccggatcaaaagccagccaatccaattgttccgcaagaaacaattattacacctgaagctccaagtgaaaatagtattatagacaatactaaaaatataattaatggatcagaagagactactacagtttctactcaggataatacaaccactgaaatattattgacccataatgcttatgtgtatgacagtgaagcaaatcctatttatcaaaatgataacaagcttgtcttgaaagctggagatacaattaagcctttggataatggtaaaaagtatagtattaaaggtaagttgttctataaagtagctaaaaatcaatttgtcaaagttgctaatactgttagttactataagttagctcataactcattcgtttataataagcatggtaaagcagttaagaagaatggaaagcgcattttacttaagaagaataagcatatttcacttcattctgataaggtcgttaagattaaagggaagaaattctatcaattaaaagatggtagctttattaaggctagaaatgttaaaagaattggttagatttagatagttaattaaaaatattaaaaaacaagattgtttccaaaatgggcaatcctgtttttttaatcctgattaatcaagctaacgggcaaagtataaacactctccaatgataccgctggatcattaatttcgcaatctctttagtccgttgccgcgcactaattaaatgtgggaataggttctgaatcaattgtgtgccgtcaaatcctgtaattaacgattttttatttaaataatcgttgcattctttagccaataaagccgtaatgtcatccgtacaacaaatcgcatcgtaatcgttatctttcaaaaattgaaggatagcgattacgatgcgataattgattcacgggcgctaattgagcgtaaatcaaatttaacgtcaaaggtattaaacacacacatcatccctttgatacgatcactgattggataatagtcttctttggaaccagcaataatgattactttcttctttttttgctttaaaaccgactttgcaatttgcatctccgcatcatagttattcgactgcacagtagggatctgcggactaattacccggtcaaaactaaccaccggtagattaagcttgccactcttctttgaaatctgaattggcgagctggtaagtaagcctacgatctttttttgcttatatttatccaaataatactgcatatcttgctcttgataatgatctaaatgcaaaatgcaatcataacctttatcctgcaaaatagtagccaagtattcatacagttctgaatagaaaggattattgatttgcgaaaaattgatttcaattaagtttaattctgttttagcggaaattgcattcttgggtttataacccagttttttgatagcttcctttatttttaaagccgaatcaatgccaacgtaaccattctgattaagatatcgcgaaacggtggcaatagaaacgccggcttttttagctatttctttaatagttactgccatgttttacacctttatatgtaaatcctacacactttctatcagtaagtatagcatattctaaaacctgaattgtcaaattaagtgcaacagttaggctatgaggaaatatattgcttgaagagttcttctgctgtgtgatattgaaggattcgacgatgtttgcggttaatggcatcagttgcctgttgaacataagcagctgacttatctttcatgcttttgcctttagggaagaattgacgcagaagtccattgcagttctcattggtgcctctttcccatggagaatatgggtgggcgaagtagatctggcagcctttgatcttggtcatatccgcaaactcagagccattgtcaaacgtgatcgatttaaaccaggcaggatgtctgtcaatctcattttgaagcagccttgggcatgtgcttgcccgatagtcaggaatcttgataactacttcaaagcgtgtggttctttcggtcaaagtcattaaagcaggctgattcttgcgtctgacgcctttaaccagatctccttcccagtgcagcggcgtttttctgtcttcaatctctttaggacgctgttcaatggaattgccaagatgcttcttgtgcaaagcatgaccgctatggccgtgatgacgcttgttcctgcgtcttttgagcttcataggcagatcaatattgcttatgtccagcaagccctgatcaatatagcgatagacggttggtgtgctgggacaagggtagcctggcatttgaattcaccaacgaattcatcgatgctggtggcatcaaatttagctttaaagcgtctggagagcattctcaaaaagacagcataatgcttcaatggattgcgctgatagcagtttttgcgacgcttctcataatgaagctgtgcagtatcagcgtaatagtgctcatacaataaatagctgctgtctctttgcaggacgcttccgcgtttgatttcgcgactgattgtcgacttatggcagccgacttcttgagcgataacagtacgggaagttatgccggaatccagcattgcttgaatttgtccacgttgtacgctggttaattgatgatagtgcttagaaatgctagaatttgaattggtcatgaagatcttcctttcttgatttttcgtcacttcaagtttaggtcttcatggcctttttgtttaacacttggtgttgcacttcaattttaaatccgggtccattattaattcctttcatagaaaactaaattccttttctaaaggggtcaagagctattatatacagttttctcagcagttacattcgcaaaaaagaaaaatgctaaatttatttaaaatatttagattttttatgcaataaggacaaatagctaggagaaagaacaaagaatatctccccatctattgatgtaacgctaaaacataatttactttctttgtaattttgtgtatactaaatatacacaaaaaagaaagaggcgtacaactatgactgtaaaattaagaaaagttggaaattcaaaaactttaacagttcctaaagatataataattactagtaaagagtatactgtgaaaaatgaggggatgaatatagtttttacacccgtcgtgaagaaaaagaaaaatatttttgcaaccaaagaatggcaaaattatgattatcaaaaagacatagaaaatgacgtggaactacaatcagtaaaaccagtgggacgtgaggtagttgattaatgatttatccgaaaaagggagatattgttaaagcagatgcagaacctcattccggacatgaaatgggtggccataatccgcataaaggtaatattagaagacattatgtggtaatgagtaccagtgcctataataaatcaacacatatgtttacgcgtggtgctagttaaatcgttctaggcaatatgccatattataagctaaaatggctatttctagccgctgctgaaagccagctaagctccttgctcggttattttcagcgttatagtaactgagcaaagaaaagtcgctttcaattgttcttctaattgccatcagttgatgattattatgttttttagcacctttcatgttttttcgatatggtgtccaaaggacatagcccataccttttaactcggcagctaagtcttttcctaagtagccttcatcgcctaaaagataatggttaattggatgagcattaatcatcaattctactgtttctttggcatcatgcactgatgctttagtgactgcgtagtcaagcaaatagccatcatcgcttactagcgcgtgcaccttgaaaccataataatagactttcttggttgctttatagccaatatcggctatgtcacggaagatcttaacacgataattacgaacaggctgacaaactggaacaggaaaactgtcaataattaaaaattctccagcaacctttacctcttgattccaagcttgacggatgcagcgaattaaaggcaaaagcatcttggctcgacgattaaagcgagaatgagataagccaacaaaaaatttacagaatcttctttgggattcaattccaatttcagtttgccaaatgagcatcgctaagatggagctgtcggaaagctttgtttgatcaatgttttttcgatgcgtaagcttatcaggcgcataaagattatatagtgaacgacaaattacatttaaacgactaaaactaacttgtaaatggtgagagaaacgattaagcttgaggtagttcaattagatcagactcttttctatttaatttacttacaacttgagtctaatccgattggacttttttattaactaaaacgatttaactagcaccacgcgtatatgtttatagggatgccgattactacttcagataaatatcaaggcaacccacattacgagccaatattaattccaggcagtaatggcactggagtaaaaggttatgttgttttatggcaacttcagaattttgactttgaatctagaaatggagaaattgttaatcacgtaaatattcagctattagacaaacttcaaggtttcgtgaatgatatggtgggactagaataggtaaaacaattatgccaattttaaggctagttcgattatgctgagaggacgattctgaggtcaagttcgactgcagaggttaaaattaatcatttaatgcaatagaatgctaattcttatttttatgggaaattagcattcttttttgtactttctaactatgtagaataatgagattttattctacatagtacatctaatcatgcattattctgctatgccaattttggggtgtgttgattatgtagtataattagctatagactaattattcaacatagagtgacgaaatacttgtatatcaaggactaatataaaaattgacagaaggagacgtaaattgaagcataaagatactcgtccaattactgatccaataattttaaagaagtttttgaaacatttacgtgaagatactagtatgggagaaagaaactatgctatatttcaaaccggtaaagcaaccttactacgggtaagtgatgttctagctttgaaaaagaatgatgtctttcaagccaatggcagagttaagaaaaatgcttatatcgttgacaaaaagacaaaaaagcctaaccgattatatttaactccagttagggatgttttagaggattactatgattggctgcaagaatatgaaaagaagcatccctacacgaagctgttttcttctgaatggctatttccaagttctaggagattaggtgaggatgttccaataagagaaaatagtttttatagaatttgtcatcagaccgagcttaaaattggggttaattggattggctcacactcaatgagaaaaacaggagcttttatggtttatcagcagactaatcataatactgctttagttatgaaaatgctaaatcactccagtgaagcaatgactttaagatagagaccgtaaaatattttgtgtaaggatgaatatttccttaattttattttcctgaatattagaaaaaggaatccttttcccgtatgattgatttgaacgaaaaacatactagaaaagagattccttcatgaatgattttaccaaagatatggctaatgctctattcaatcaggataaaattaatgatttatttagacaaaagctccaacaggctgtcaatgacctgcttgaatccgaattgactgcctttttaggctacaatccttatgagcgcgatggctggaataccggaaattctagaaatggtgcttattaccgcaaggttgatacgcaattcggacaaatagaaatcaaagttcctagagacagaaacggtgagtttcatcaacacactatgccagattataaaaggcatactgatgttttagagcaaactgttatcaagctctattccaagggcgtcacaacccgagaaatcgctgatttgattgagaaaatgtatggcggctattattctccagctatggtttccaatatttctaaagaaatgattcccaaagttgaggcatatcatcagcgacatctgtcagataagttcttctgcgtttatctcgatgccacctatattcctcttaagcgggtcacttatgagcgcgaagcagtttatatcgccatcggtatcaaacctaatggtcataaagaagtgattgactactgtattgcgcctactgaaaatattgagatttggagcgaaatgctcaaaggcttcaagaggcgcggccttgaacaggtagagctcttcttgtctgacggagtagttggcatgaaagaggctatctgccagtcctatcctaaagcgcattttcaacgctgcttggtacacgtcatgcgtaatatcagtgccaaaatgcgggttgacgatcgaaaaaagcactggatgaattcaagcagattcatactcagtcaaacaaagaaatggctgtacaggtgctgcatgaattctatcaaaactgggaaaaagcctacaaaaacgtagttagagatcttagacaggttgagcctgatctgttaaccttttacaactatccgccagctattagagcttcaatttactcaactaacatgattgaatcctttaacaacaggcttaagcggaaaaccaagcctaaaacagaatttccaactgagcagtcgcttgacacctttattggagttcaggcaatggattacaatgaccgttactttaacaggattcataaaggatttgggcaagttcgagacaccctagaatcctattttgattaaaagataaataaaaaagtcaatcaacgagagagattatttacacaaacttcttgacagtctctaatgtcttaactgttaacttaggaaaatgtcctaattgtagtaagtatgacataatttcctttattggaggttatagttagagtgaataggattgatttaactatgaaatatgatgaacagtacaaagtcattaaggatcttgtagatcacaacggcaataagaaaagagcagccttgaagctaggaatatccgttagacaaataaacaggagaatcaagcagtatcaagctaaaggaaaagcggccttcgttcatgggaacaaagaccgcaaacctgttaattgtctcaccacagaaattaacaatcaaattgtaaccttataccgtactaaatatcaagactgcaatataaaacattttgtacagctgttagatcgctttgaggacattcatgtctcttataccaaagcttacagcctgctcaagcagcaggatattctttcccctaagccttggagaaagactaagcgtgccttagccaaaaagaaatggcataagcagcaccctaagcaaagcaaacaagaagtcagcgctgcagttgatcatcaactagctttggcagatgctcatcctcgccatgaaagatgcaagtacttcggcgaagaaattcagatggatgcttctgtcttagtctggtttggtaagcgtaaggcttacctgcaccttgcaatcgacaacgctactggcattattgttggggcttattttgactgggaagagactttgaatggctactatcacgtctttgagcaaattcttaaggaatatggcattcccctttgctttaagactgataatcggactgtattcaattatgagactgctcaaaccaaagctgcccataaagatgtgctgacacaatttggctatgcctgcaaaactcttggcgtagatctaaaaactactagtgtttctcaagccaaaggcatggttgaaagagctaaccaaaccgtccaaggtcgccttaagccagaactaagattggctggaatcatgacaatcaacgaggcaaataaatacctgcatgatgtgtttgttcctgactttaaccaaaacttcagtcagactagtcgtaaagcctggtatgtttttgaaaaggctcctgatgactgcaaaatcaattataccttggccgttctcactggcagagtgtttgatagcggctcagctatttctttcaaaaacaagctttatcaagcaacagatgaatatggcaaattagtctgcttcatgaaaggaactaaatgtctggtaattgaagccctagatggacaactgctaacgacagtagatgagcatgtatatctgcttaaagaaattcctaagaatgccaaaatatcgccagaagtagaccaagagcctaaaaagaaaaggaccaagaaaaagtggattccaccaatgtcacatccatggaagcgagaatcattcataaagcaacaaaagagagctcataaataccatcaatacgtataaaaatagcggagagcaaattctccgctaataattaaataattttgggacattttcctaaattattgacatatttttatgataattcatttgcaagcgtaagtcctcgtaaattggttttccacctaaaatgtccagaatgtagtaagcaacgaaagtaacaataatcattggcaatacttgctggacagtcccaatcatttcagtcagtagcataattgctgtgaatggtgctttttctattgcaccaaaatatgcggccatggaaatcactaggatatgagggaagtacattggcaaaataatctgcaattttatcataatattggcgcaaattattcccaataatgccccaagaactaggataggcatgaaaataccaccaggtacggaagaatcatatgaaagcattgaaaagacaaaccgaattatcaagaataagatcggtagtaaaaaaagtcccatgatccaaaggctttgacattccaattcaaattgaataaattatcaattaacacatgtgaaccaccgagtaagtgggcattaaatagaccaactggaataattaaaattaaagcctgaattgtcaaattaagtgcaacagttaggctatgaggaaatatattgcttgaagagttcttctgctgtgtgatattggaggattcggcgatatttgtggttaatggcatcagttgcctgttgaacataagcttttgacttgtctttcatgctcttgcccttagggaagaattgacgcaaaagaccattgcagttttcattggtgcccctttcccatggagaatatgggtgagcaaagtaaatctggcagcccttgatcttggtcatatccgcaaactcagagccattgtcaaacgtgattgatttaaaccaggcaggatgtctgtcaatctccttttgaagcagcctttggcatgtgcttgcccgatagtcaggaatcttgataactacttcaaagcgtgtggttctttcagtcaaagtcattaaagcaggctgattcttgcgtctgacgcctttaaccagatctccttcccagtgcagcggagcttttctgtcttcaatctctttaggacgctgttcaatggaattgccaagatgcttcttgtgcaaagcgtgaccgccatggctgtgatgacgcttgttcctgcgtcttttgagcttcataggcagatcaatattgcttatgtccagcaagccctgatcaatatagcgatagacagttggtgtgctgggacaagggtagcctggcatttgaattcaccaacgaattcatcgatgctggtggcatcaaatttagctttaaagcgtctggagagcattctcaaaaagacagcataatgcttcaatggattgcgctgatagcagtttttgcgacgcttctcataataaatctgtgcagtatcagcgtaatagtgctcatacaataaatagctgctgtctctttgcaggacacttccgcgtttgatttcgcgactgattgtcgacttatggcagccgacttcttgagcgataacagtacgggaagttatgccggaatccagcattgcttgaatttgtccacgttgtacgctggttaattgatgatagtgcttagaaatgctagaatttgaattggtcatgaagatcttcctttcttgatttttcgtcacttcaagtttaggtcttcatggcctttttgtttaacacttagtgttgcacttcaattttaaatccgggattaaaattaaaggaatgatactgtgataggctgcagggatttttttaattttactgaaccatggctttagcgaaagtagtacatattgataaatgtatgccattattcccaaaaagataccaattaaaggtaaataatcgttaacgggtaaataaaggaatggtttgtttccaaaggctagaatagtaacgaagtcagctgaaaaagtggcggccaagacggctactactttttgaggtttaaaatcaaaagtaatttcttcgaccaagaaaagtgcaccagctattggcgcgctaaaggcggcagccaattctgcagccacaccgcattattgtagcgttctcaaattttccttgttagatttaaatactttttctgctaatccttgaccaaccattgcgcccatttcaatacaaggaccttcacgacctagcattaatccaggacagatagctaataagcctccaataaatttccgccaaagaatggaccaccatggcatcttattttcatttaaaagaacagcctcgatttgtggtacccctgagccaattacttgttcaaggtaaggcgcagttattttacctaatgttattgcaataatgaacatcaataagatgtagggtacgatcagtactcgctgggctgccatttgcggataaatttgataaagcaacttcatagtttgatcaataatccagcgaaatgcgctaactataactccagtagttagcccaactgaaattgcttgaaccaaagttttagtcatgttggttgaaaaaaggttttgctaaaatctgttttgcatttttaatcattacatttccccatattacagacgatacatcctttttatcctaacaaaatatagcaaaaaaggcatttatgtttttgatgaatgatcttatttttgtaaaaattgttgttcccaatcatagacattttttatatgcttctttaaagcgttagaggctaacaaaatatcttttttctcaactgcagaaataatatccattatttcctgaaccgaggatttcatacaacgatcattgtctacgatggcataacgcatacgattggtttgagtacgtaaaagatcgatggttcgctgaagcgtgggatttccggtattttcagttaaaaatacatggaatagttcatcaagtttaagataagcttgccaatcatgttttgctaaaatttcttggaattttattccataatcattagccagttgtggatctaaattgggaaaatttttttccaaggcataactctctaatagagaacgtaaatcataattgtcttttaattcagctaatgtaatatggctaacgattttttttgtccttgacgaactagtaagccttcattttccaattgtttgattgcttctctaattggagtacgagacatgttaagtttaatacgcgtttgattttctgataaaagatgacctggcttaaaatgaccagtgtttatttggagactgtaaaatagtttgtgtaaggatgaatgattccttaaatttatttctttaaacattagaaaaaggagttcctttctcgtatgattggtttgaacaaaaaaacacatacagaaagaagaactccttcatgaatgattttaccaaagattttgctcaagctctattcaatccagacaaaataaatgatttattgcgcaaagagctacaacaggctgttaataacttgttagaagctgaattgactgcctttctgggctatgatccctatgccagaaatggctggaatactggcaactctagaaatggtgcttatttccgcaaagttgatacgcaatttggcccaattgaagtgcaagtgcctcgggatcgcaacggtcaatttcatcagcacacgctgcctgactacaagcagcactctgatgttttggaaagcacgattatcaagctatactccaaaggcgtaactaccagagaaatcgctgacttgattgagaaaatgtatggcagtcattatagtccagctcaagtatcaaatatttccaagcagatgctccccaagattgaggcttatcacaagcgcaagctaagcgacaagtttttctgtgtctatttggatgcgacataccttcctttgcgccgagaaacgtttgagcgtgaagcagtatatattgccattggcattaaacctaatggacataaggaagtcattgactactgcattgctcctagtgagaacattgaagtttggacagagatgcttcaaaacatgaagtccagaggcttgaagcaagttgagctttttctttctgatggtgttgttggcatgaaaacagccttggccaggacttatcctaaagctcattttcaacgctgcctggttcatgtcatgcgcaatatctgcgctaaagtacgcgtcgacgatcgtgaaaagatcatgaacgaattcaagcagatacatcaacagacaagcaaaaaagaagctgcagctgtcttgcacaaattctatgccaaatggaataaagcttatagccatgtcatcaaaggtttgaaggaaattgagcccgatctgctagtcttctacaattatcccaaacaaatcagagcttcaatttattcaaccaatatgattgaatcctttaacaacgtcatcaagcgtaaagctaagcctaaggcagaatttccaactgaacagtcgcttgatgcatttattggcatccaggcaatgagctacaatgaccgttatttcaatcgaattcataaaggctttggtcaggttcaggacaccttagaatcctactttgattaaataaataattaaaaaatcaatttacgagaaagaactatttacacaaaagatttgacagtttctattcatttggttctcctaactaagataattttacaacttttttattttttatattatttgcaactaataaaactaaaaacttgtatacaggttatctgtggtaaatcgttgacttacaaaatataagttttactatgtaattgtaagttaaattttgatagaaatgaggaaagaaaaatgactaaaattgcagtacttggtgcaagtggacaaattgctaaattagcagaaaatttatttttggaagataaaaataatgaattaattttatttttacgccatcctaataaattggataaaaaagatatcgatgatcaacgtgaaaggattgtcgtaggggatgcaagtaaattggatgaacttgctccggctattaaaggtgcagatatcgtttatgctaatttagctggttcaaatattgaagatcaagctaagacagttgttaaagctatggatgaagatggtattaagcgtttgatttggatttcctcgttaggagtctatgatgaggtaccaggcaaatttggtgaatggaacaagaatattttaggttcatatttgaccacttatcgtgcagctgctgatcaaattactgctagcgatttggattacacgattattcgtccagcttggttgaccaataaagatgaagttgactatgaaataactgaaggcgcaactaccccatttaaaggaactgaggtctctcgtctaagtgtggctagttatgtaaatgaaatagttaaagaccaaagtaaagacagtcgtggtaatgttggtttaaataaaccaaataccgacggtgataagccagcttggtattaaaacaaaaaaataaagaccagcttcaaactgaaactggtctttattttggcttaattatttttcgaattgtttgccccaagcccatggatcttcgtgccaggtctttaagacatcatattgcgtgctagaaatatgacctgactcattttcctttttgagtaattcagggtaggaaagaagcggagcatatttaacattagctttagcaaagttttcttttgcatccggtaggtagtaggtgaaaattgaagaaacgccaatgacgttgccgccatctttttcagttgctttaactgcatttaaaacggaaccaccagtggtgattaaatcatcgattaaaacgatcttatcatctttactgaagcggccttcaatttggcggcctttgccatggtcctttggcttaggacgaacatagatcattggtaagtgtagtttatctgcaacccatgcagcatggggaataccggcggtagcgacgccaccaataatagtagcctcagggaattctttggcgattaaattagctaaatcaccagcaatcatatcgcgtaattctggatatgaaaccgttaacctaaggtcggtgtaaattggagaaagcatcccacttgcgtaagtgaatggtttgtcaggtgagatagtgataattttttcttgaataagttgactgataatttgatccttatgcattttagttaaactcctttttaattgcttcatatgcagcttctgggtcactggctaaagtaattggccgtccaacaacaatagcgcttgagccccattctttggcttgcgctggtgtggccacgcgagattgatcgtctttagcattgccagcaggccgaattcccggtgtgacatataaaaagtcatcgccaactttttcgtgtaattcttttacttcaagtggtgaacaaataaccccatctgctccagagtgcttagccatttttgctagcgaaagaacttgctctttcattgacagtgcgcaattttgttcatgtgccaatacttcatcagaaatcgaagttaattcggttactgctagtaacttaggcacgcttttgccagcaggtgtacccgcgattaaaccgtctttagctgatttgatcatttgactgccgcctaaagcatgaacggtagtaaaagtaattcctaacttagctaattgtttagccccgttataaacggtattagggatatcatgcaattttagatccaagaaaatcttataaccttgctcagctaagtctttaaccacttggttgccagcgtgatagaataattccataccgactttgataaagacgttttctggtttgcctaatttagacaaaatcttatgcagttgctcttcattgtcaatatctaatgcaacaattacaggtttcatttttcctccacaaaaaaagtctatcttagcgcagagagacaccaaggatagacttttcctagataatttaagtcaatattttgaacttgcggtctctctgtaccgtttaaagtttgatcaaggtgaagtttaacacctcaaaagtaaaaatacaaataaaatttttgcttggaaaaaattataatcacgtgtagaatcatttcttgaaaaaataaagagtgtccgtgagcattcattttggaggaaaattatggttaatacacatgtaaaattaccaggtttagatttgaaaaatccagttatgccagcaagtggaacttttggcttcggcgatgtgcctgcagctaagaagtttgacttaaatgatcttggagcaatggttattaagacaactacgccacatgcaaccacaggtaatccgcaaccacagattgacgttttagatgatggggttttgaattcggttggtcttactaatcctggtgtggaaaaggtgattagtgaaaagttagaaccattgagaaagcaatatccagaattaccgatcgtggctagcgttggcggtgatagtgaagcagattatgttgaagtagcacaaaagctgtcaaattctggcttggttaatgctttagaaattaatgtttcttgtcctaatgtggctcaaggtggaatgagctttggcgtgcatgccgatgtggttgaagaattgactagaaaaattaaagcagttgtcaatattccaatttatgtgaagttaacaccaaatgtgactgatatcactgtaattgctaaagctgccgaaaagggtggtgccgatggcttatcgatgatcaatacattgctagggatgcgaattgacgtgaaaaaacgcagaccactgttaggccataatatgggcggtttatcaggtgaggctgttaagccaatagctattagaatgattagtcaagtgcgtcaaattacttctttgccaattattggcatgggtggcattgcttcggccgaagatgtggtggaatttatgttagcaggtgctaatgccgtagcggttggtactgctcattttaaagatagtattgcttctaagcatattgcagatgccttgccgcaagaacttgaaaaattaggcattgaagatatcaatgaattagttggtcaagtaaaatttaattagagcttgacaaacgtttctaattacagtaactttaaagcaatgaatgtcctttaaaattagtcccgtgaggctagcaaggcaggcttaacttaagtttcgactttactaaagctcctagtctcagttgagattgggagcttttttcatgggcagaattaggaggctataatggcaaaagaaatctgggatgcactagcaatgaagcgtgctttaacccgtattacttacgagatcattgaacaaaataaaggaaccgatgatttggttttggtagggattaaaacgcgaggcgtttacttggctaaacgaattcatgaccgtattcagaaattggaaggcgttgatgtaccagttggtgaattggacattaccttatatcgggatgatcgtcatgatgctagtttaaagcaagatccagttgtcaattctgatcaagttggtgttaatattgatgacaagcatgttgttttgattgatgatgttatctatactggacgaacaatcagagcggcgatggatgctttgatgcacgttggtcgcccaagttcaatcagagtcgcagtgctagttgatcgtggtcaccgtgaattgccaattcgtgctgattttgttggtaaaaatattccaacttctgccgatgaacaggttgctgttaatgtaattgataaggacggcaaagattcagttgaactgaaggctttaccaaaataaaaagaagatagttaaatatccaaccatttaattgactccagagagggccagaagggttgatttcttttcgtgtacacgggaagactctaggcctggagcaattaaatgcttcaggcttttttgtatagaaagaatagaaaatggaaaatttaaatcttgttaatttaccacattttgtgagtgttgaaaatttggatagtaatgaagtagaagccttaatcaggagagctgagtacttcaaaaaaggcggtgcaacaccacgtttaactaagccagtttatgtaactaatatgttttttgaagattcatctagaacacatacgagctttgaaatagctgaaagaaaactaggtttgacagttattccttttgatccggctcattcgtctgttaataagggtgaaaccttatatgacacttcattaattatgaacgccttaggtgtcaacttagaagtgattcgtcactcacagaatgagtattacaatgatttgattaacttaaaagaacatcaacatttaaatattggtgtgattaacgctggagatggtagcggtcaacatcctagccaatgtatgctcgatatgatgactattcatgaacattttggccactttaaaggcttaaaggttgcaattgttggtgatattactaattctagggttgcaaaaagtgacatggaacttttgactaggttgggcgctgaagtttacttctcaggtccaagttactggtatgataaagaattcgatcaatatggtaagtatgaagaaattgatcaattagtttcaaatatggacgtgatgatactcttacgggttcaacatgaacgtcatgcaggcgatcctaatgaaaagacttttaatgctaaagcatatcacgaaaaatatggtattaatcatcaacgctatagtgcattgaagcccgacaccatcatcatgcatccgggtccaattaaccatgatgttgaacttagcggtgatttagttgaaagcgataagtgcatgtttgtcagacaaatgcaaaatggtgtgttcatgcgtatggcaatgatcgaggcagtattgcgcggtagacgacttggaggattagaataatggcaacagtaattaagaatggcacagtttatcaaaatggtcgtctaattaaagcagatgttttaattgaagatcaaaagattaaagcaatagggactaacttaacggcagataaagagattgatgcaagtggcaagctagttagtcctggactggttgatgtccacgttcattatcgtgatcccggacaaacttacaaggaagatattaaaaccggtagtgaagccgctgctcatggtggttttactatggtaggggcaatgcctaatgtaacgcctgtacctaatacgcctgagctaatgcaaaaaatggtacaagaaaacaatgaaaaaggtgtggttcatatttttcaatatggaccaatcactaatgatgaaactactgatgtcattcctgattatgcagcattgaaaaaggtaggtgcttttgccttaagtaatgatggtcatggagtccaaactgctcaaacgatgtatttggcaatgcaaaaagccaaggaaaataatttgatcattgctactcatgcacaagacgattcgctttttaataaagggatcgtgaatgaaggacctaaagccaaggaattaaacttgccgccagtaactgaattagcagaaacaacgcaaattgctagagacttgcttttagcacaaaaaacgggcgtccattatcatatttgccatgtatcaactaaaactagtgtggaactggttcgaatggctaaggcgcgtggaatcaatgttacctgtgaagtagcgccacaccatattttattaacagatgacgatattcctaaggacaacggttattataagatgaatccgccattgagaaataaggaagatcaagcggcgttactagtgggactactagacggtacaatcgatttaattgcgactgaccatgctcctcatgctcgcaatgaaaaagaaggtggcatgaagggcgcagcctttggtattactggtagtgaaacagcattttctactttatatactaaatttgtcaaagaagaaaaagtcttcaccttggagcagcttttatcatggctctccgataaaccagctaaaacgtttggcttaaaaaatgccggggtacttgaaccaggtaagccagctgatattgcgatttttgacttagaccatgaaactgaattaaaagaagaagactataagtcaaaaggcgttaatacaccatttacgggcgacaaggtgtatggtgaaactgtaatgaccatggttgatggtcaggttgtatacagaagggatgaacaataatgcggtatttaatcctagaagatggtagcatctatgctggcgagggttttggcgctgattgcgaaacagttggtgaagttgtatttacaacagggatgactggttatcaagaagcaattaccgaccaatcttatgccgatcagattttggttttcactaatcctttaattggaaactatggtattaccttggcagattatgagtcacttgagccaaggatcaaaggcgtaatttgtcaccaggttgcccgtcatcctgataattggcgaatgcagacaaccttaccaaagtttttggagcatttgaacattccaggtattcagggaattgacacgcgtgaattagttaaaaaattgagagttcacggtacattacgtggtaagattgcagattcaaaagaaaatgcagaaaaaattgcggcagaattaaagactaagaatgtaactcaaggtgtaattagccgagtatcaaccaagtcaccatatccagttcctggttcgaaacgcaatattgtggttatcgactttggaattaaacacagtattttgcgtgaactagcagaacgtgattgtaattgtattgttttaccatatacagctactgcccaagaagtattaaaccttcatccagatggtgttcttttgagtaacggccctggtgatccagaagaaatggtagaggcaactaaaatggtgcgtgaagtagaaaagcatgttcctttgatgggaatttgtatgggacaccaagtctttgctttagctaatggggctaaaacttacaagatgaaatttgggcaccgcggttttaatcaccctgtacgagagattgcaactggtaatattggttttacttcacaaaaccatggttatgctgtgtctgcagattcaattgacaaggataacttaatgattacccacgttgaagtcaatgatgggacggttgaaggattacgtcataagaaatatcctgcattttcagtgcaatttcaccctgatgcaacaccgggtcctcatgatgaggtttcattattcgacgactttatgtcaatgattgatcagagaaaggaagaagagcgtcatgcctaaaagaacagatattcataagattatggtgattggctcaggtccaattattattggtcaagctgcagaatttgattattctggtacacaggcatgcttggctctgcgcgaagaaggctatgaagtagttttagttaattccaacccagctacgatcatgactgatacaacaattgcagataaggtgtacattgaacctctgacagttgaatcgatttcacgaattattcgtcaagaatatcctgatgctattttgccaacacttggcggtcaagtgggcttaaacatggctatggaacttgccaaaacaggaattttggatgaattacacatcgagcttctaggtactaagctgcaatctattgaacaagccgaagaccgtgaaaaatttaaggaattatgtaagtcattaggtgaaccagttccaccttctaagacagttaatacagtcgaagatgccttagcttttggagatgagattggctatccgatcattgttcgtcctgcctttacaatgggtggtaccggtggtggtatctgtaataatcatgaagaattagcagagattgccaaaaatggattggaactttcccctgtaactgaatgtttgattgaaaaatcaattgcgggctataaagaagtagaatttgaagtaatgcgcgaccatgatgacaatgcaatgattgtctgctgcatggaaaactttgatccggtagggattcacactggtgattcaattgtcttttcaccaagtcaaactttatctgataaggaatatcagatgcttcgtgattgttcactgcgtttgattagggctttgaaaattgaagggggatgcaacgttcaacttgctcttgacccaaatagctttaattatgatgtaattgaagtaaatccgcgtgtttcaagatcatctgctttagcttctaaggcaactggttatccaattgctaagatggctgctaaaattgcagtaggaatgactttggatgaaattaagaacccagtaacgggaacaacctatgcagaatttgaacctgcattagactatgtagtctgcaagataccacgctggccatttgataagttccctaaggctgatcgcgttttgggcacccaaatgaaagcaaccggtgaagttatggcaattggccgtactgcagaagaagctatgcaaaaagcggtaagatcactagaaattgatgaaaaagatctttactcaccagaagcacacgtagctagtgatgaccaattagagcaaaaattagtcaaagctcaagatgatcgtctcttctatttagctgaggcatttagacgtggttattcagctgaagatgttcatgaattaacgaagattaatttctactttttagatatcgtgcaacatatggttgaattggaaaagacacttgaggaaaataaagatgatgttgatgtattgcgcttagctaagaaatatggctttagtgatccaacgattgcctctttgtggaatgaaactgcagatgaggtaagagcatttcggaaaaagcatggcatcatcccagtctacaagatggttgatacatgtgctgctgagtttgaatcaaagacaccatacttttattcaacttatgatgctgaaaatgaatcacataagactggtaagaagtcggtgatcgttattggctcaggtccaatcagaatcggtcaaggtgttgaattcgattatgcgactgttcactgtgtcaaggccttgcaaaagatgggctacgaagcaattgttatcaattctaatcctgaaactgtttcaactgacttctctatctcagataaattatactttgaaccattaactttggaagatgtcttgaatgtctgcgacttggaaaagccagaaggcgtgattgttcaatttggtggtcaaacctcaatcaatttggctcatggcttagaagaacatggcgtcaagattttaggcactaaagtagctgatgttaaccgtgcagaagaccgtgaactgtttgatcaaatcattaagcaacttcatttgaatcagcctcaaggtttaactgcaactactcatgaaggcgtacttgaagctgctgataagctaggctatccagttttagtccgtccaagttatgttttgggtggtaaggcgatggaaattgtctacaccaagggagagttagaagaatacttgcaagaccacgttgatattgcagcagaccacccaatcttggttgatgattatcttgatggtcgtgaatgtgatgttgatgcaattagtgatggtaaggaagttcttttgccaggaatcatggaacatattgagcatgccggtgtccactctggtgactcaatggctgtttatccaccacaaaccttctctgatgaagttaaagaaaagattactgatgtcactagaaagcttgctttgactttgaactgtgtcggcattatgaacattcaattcattgtcagagatggtgaagtttacgtaattgaagttaaccctcgggcaagtagaacagtgccatttttaagcaagatcacgggtattgaaatggctcaggtcgctacccgagtaattatgggcgaaagtttggctgaacagggctacggtgatggtcttgccccagagccagacatgatctctgttaaagcaccagtcttctccttcagcaaattatcggacgttgatgcatatctcgggccagaaatgaaatcgacaggtgaagtaatggggagtgatcacacttttgccaaagctctctacaaagcttttgcaggtgctaagatgcaattgcctgaaaatggtaatgtattacttaccatcgaagatcgagacaaagaaaagattttaccaattgccaagagatttgcgcggattggctacagaatctttgctactaagggtacagctgatttcttgcgcagtcataatttgcatgttgatccagtaactaaagtgcatgaagatgaagacgccaaggataatatcttgaatgaattaagaaatggcaagattgacttggttatcaatacgatgggtcacgatattgaaaagaattctgatggcttcatcattagacaggttgccattggtcaaaatgtaccattaattacagcacttgatactgcagatgctttgcttactagcttggagaatagatcatttgctactgatgctttgaagtaggatagttgaatagataaaaataatgcatttctctattgaagtaggagaatgcattattttttatgcaaaaaattattttcacaagtgagctaataattctgagataaataaacgatagatagcattcaatcaagatattgtgaaaaaaatatgtatcacaaactttattatagagccatgagtaagagtatttcactatctttcgtaagcgaatacatttataatctgagataaggaagtgaagtgtttaggggggaataaaaatgtggatttcgtttttattggctttaattccaattatttggcttatttactctttggcaattcgaaaaacgcctgctattaaagcatgcagcattggactattaattactatcgtattggctatactgggatttaacctctctatagttgacactttgacgggtgctttagagggcattctgatggggctatggccaattgtttatgtaatcgtggctgcactgtttacttataatgtaagcaattattcaggtggaattaaaattattcaagatactttgtcgtcaatcactactgatcagcgtattttagttttgattatcgcatggggatttggcggattcttagaagcaattgcaggttttgggacagcagttgcaattcccgctgggatattaattggatttggtcttaatccgattaatgccgccgtaatttgtttaattgctaatactacaccaactgcctttggtgcaattggattaccagtgattacactgagtgacgtaactaatttgcccgttactccattatcatttgttattactttacaacttgcattattaattattataattccgtttttattggtgattctaacaggtggcggagttaaagctatcaaaggagtgggattaattaccctgatgtctggtttgtcattttcaattccgcaaattttggtagcaaaatttgttggtccagagttaccagcaattgttggttcaatttgttgtattttgactacagttctgatggcaaaattatatcatcatcaagataatgacataaaagagaatattgagaagcacagcgctatcgaaattttgcgtgcaagttcaccatttattttagtgttcgtatttgtggttcttgcttcatcactgtttccagatattcagcatctattgggaaaagtgacttcttatattaaggtatatactgggaaagatacagaactgtttaagattaattggctttcttcaccaggaacattaattttgctagctacttttattggtggattaattcaaaaagttagtttcaagaaattaggacaaatcttaaaatcaacaatttttggattgtggaaaacattaattacaatttgttctattgtggctttagccaaggtaatgggctacgcaggaatgacttcagcaattgcggcagcattagtagttctaatgggaccaatatatccattagttgcaccgttaattggtgcttggggtacgtttattacaggatctgatacctcagctaatgttctttttggtaacctgcaattgtcttcagctaaggctttaggcgtaaatagtaattgggtagttggttcaaatatggtgggagcaactgctggaaagatgatctcacctcagagtatagctgttgcttcagctgcaattggacaagatggatctgaatcaataattttgaagcaagtggctaaatggtgcttattgtatttgggaataatttgtatattcctatatggaataggctttgccgtaggatttttataaaaataatttaaataactcttggtgttctgatatatattgatttgcacttgtcatccattaatagtaaatcgcttgcattaaaagcgctttcgttgatagaatgctttttgtaacttttttacattaataagggagacaaaacgaatgagttatttatttctgtttattccggcaataggatggggtcttatgcccatgtttgttgctggtgtcaagaagagtaacatttaccaccaaattttaggtaccgttattggtgcatttatctttggtgctgcagttactctcattaagcgtccatcttttaatgcgactacttttattttagcaatgttagctggtgctgcttgggttattggtcaagttggtcagtattacagttattccaaggttggggtttctgaaactatgccaatttcaactggtttgcagttgatcggagtgccacttgtaggtgtgttgatctttggtgaatgggcaagcactcaagctaaattgtttggatttttagggatcttagctttaattattggtgtagcatttacatcattgactgacaaaggtacatctgagggtggaaaaaagaatcagaccactacaatgattgtgctggtattgactacacttggttacattacttcaagttccattccaaaggccttgaagggtgacagcgtaatgattttctttgctgaaaccattggaatgttggttgcagcaattgtttatttaattgcaactaagcaaacacaagtctttaaggaaaaagaaagttatcaagtaattcctgccggtgtgatttacgcaattgctgctcttgcatacattgtttcagttaagatgaacggtgtaaacctagcctttgttatgtcacaactttgtgttgttatttctactcttggtggtatccttttcttacacgaaaagaagacacaaaaaggtcttatttatactgtgatcggtttaatattaattgttgccggtgcagttttgacctcagtattttaatgaattttaaataaatattgaatgaactccaacatgataattgttggagtttttgagtaaaaaagtcatgaataaatataaaatgaattaaaatataagtagaagccaaagagaggatgatttctatgagtgataatacagtatacgtgatcgacggtcgtcggtatgcacgtaatggagaaattgtcgaacataatgtgcatgtttatagttcttatcaaaatctgattgctgcatttaagccatttttggaagtttcaaataaagaagtgcatatgaatggcaaaaatgagatgcttcaggttagaatatatgatccatcaaatcaatttttgacaaaatataaatttgatatttatgaaaagaaaatagataatttctttccaagtactactgaacatatttagcaaaggaatgatccgatgacttttaacaaagaagaaaaagagcaagctttaaagcggctaactgatgaggaatataacgtaactcaaaaggctgctacagaatatccttttaccggaaaatatgatgatttttatgaaaaggggatttacgttgatgtagtgtcaggtgagccacttttttcaagcttagataagtataatgcaggctgtggttggcctagttttactaagccaattaagaaattaacttaccaccgcgatcaatcgcacggaatggagagaacagaagttaaaagtcccgaagctgattctcacttaggtcatgtttttactgacggcccagtggatcaaggtggtttacgttactgcattaattccgcagcattgagatttattccatatgatcagttggaacaggctggctatggtgaatataagaaaatatttgaataaaaaattatttctcatagaacttaatttcagtattggccaaatcaactgtataagtttcttcttcaagtggtcgtttagtcattccttcatcagttgagtagatgatcaaggccaacttactaccagatggaagagtgtagtaggtaggttgaagcaagaagtctaaatcgtagaacttgtcagcatcaatcttctcaggtcttttcatgtccttatagttttgtaagttcatgtgacccttagtgatcaacttagccttagtcttcttgtccggcacaaattcttgcaaagtatcagtgccaaatctatagccaagttcttgaccgccgcgcattaagaacttaggtgtagcggttaagcgtcttctttctcccaattcaactaaagcaacagaaatttgtcccttaggtaagctgcctttaactctaacttttacttcaggacgaccgacaatcgtagttgggtgaataaattcgtctgtttcaaaacgcaaacttggtttagcccatttttcatcaccacagatgaacttgtatagccagtcgctttctgagatgtcagccttcttaaattcaatgccaccttcatcgacaaatgattgttgtgcattgccattgccatcttggaaaagctcgccgtcatcagttgggtagtaggtcttcttttgacctaattcatttgaccaatccttttcttcgtgccacttgtcagcttgcaagttgtcctggatcatgacggttggccattgcttgtaagcattgttttcaatccctagtaattcatgtacaaaccaaaggttcattaagtcagtaaaatcaatagaaacaaagttgttcatattgtagtgaggaccttggtgtaggaaaagatgatgcttcattggcatttttttgactagttgccaaattttataaacattctttggcttaacgttccagtcatttaaaccgtgaacagaaatccaagaacatttgatgccgtcagcgtgatggcggtagtttcttgcttcccaaaagttggaatattgaccggtttcacggtcttcttttgttaaaagctctttttgcatcttgtcgtattccggtttgatcttcaagtaagaacctgcatcccacaagtttgattgacaagtttcagccagtaaatcaaggtcttcaccttggcaggcttcgggtgcgattaccaaaccgtgttcacggtaatagtcataccaagaagaaatagcagcttcagaaaccacagttttcaaacctttaaccccagtagtggcaatagcaatttgcaaagtgcctaaatatgaacgaccagtcatcccgatattgccattgcaccagtcagctttggtttgaacagatctagtacggtcagtgtaagcaatacgatcgccgtggagccattcgataactgcagcagctgattcagtttcttcaggtgcaccagtaatacgaaccccatcactaccacgggtaccgattgctccagcaaaaacactggcaaaaccacgagcaagcatatactcatttaatggataagaagatttatgtactgcttcttcggtagctgggtggttagagtcgtctggctgctttgctttaactattggtgcatgaacatattgtggatcattccaatcggcggcatcagataaattttcatcaacattatggttacgcttttcattagcgataattccgccgaaatatggtgaagcagtataaagggcaggcacttttaagcctttgttagtttcagctggtcggaaaacagtaacttgaatcaagtcactcttaccatcatgatcagtatcaagatcagtttcaacgtaaacaacttcacgaattactttgttggtatcgaagacaggaatagctttgccattgaaaaatttaaacttattttgtccccagaattgagtaaagtaccccttaccagccattacatcgagcaaaatttgaccgtttttggcgcgagtattgagcaaacgataaaaagcagagattaactttttgacatcagaaatgtcttggacaaaaggtaaagcattcttttgcataaagccagttggatcgactaattcgtagtcataatgaacatgatagccaagtaattgtaaggctacattatagaattgagcagtaccaattgattcaggctttccttttaaaaagtcagctaaagtttgctcatttgaaacagcaaattcagataattttgttgtcttagcagcgtcagtttttgcttcagcaattgtcattttaacgagcttgcccagcaaatcgttaaaattccagtctgcataatttttaggtaagaaattgatgtcgattaattcttttacttgttgatcgaagtcagtttcgacataagcgtattggttatatttcatatttttctcctttgcagtttaattactttctattttacttttaattgtggctataaccaatagatatggaagttaataagcgaaaaatatttttattttggtattcttttctttaaaatgaacttaaacaaatgggggatgctaaatgagaaaaaagttttcacttgtcttgctacttacaacgatatttacaatttcgctgacagcttgtactaatcagaataaggttgatcatactaaaagtcagactaaaatcacctcaacaccgacattatttttccacggtgtggttcgtcatatcatactgaagaacacatggtggcagcagctgagaaagctggagtcacgaactcagtgattagagctgaggtggcgcctaacggtaaggtttctttgagtggaagttggaaaaaaggtgccaaaaatccaattgcagaagtcaattatgaaaataaccgtgagttgaacttttctcgacatggtgtttacgccactaatgtagtgaaggctctgcaaaagcgttatggtattaaaaaatgaaccattctttaggaaatatttcgatcatttattatatgctgcaaaatggacgtaaccggaagatgccacaattagtcaagcaagtcggcatggcaggacattttgctggtttgaactttagccgtgttcccgcctcaattcgtcaacctaaaggtttaaaattgaattctgccggaaaaccgaacaaaatgaattctagctattggcaaatgacgggtgtaagagaaacatatccgaaaaataaagttcgtgttttaaacatcattggtgatattggtggtcaaaccgatggaacagtacccaatgtatcatctttgtcattaaagtatttagtggcagatcgtgctaaaagctatcaggtagtgaagtttactggaaaaaatgcacgtcactccaagttgcatgagaatccaaaagtagataaagtattaatcaaattcctgtggaataaataaagttagtaataggcatgcgaacgtatgtctattttttgtgccttttcttaatccaattacttgaattataaaataatgcgtgtataatattcatctaattaataaagaaagggcatggttttatgaagctattaaagactaaaatcttaacaattctgtgtggcttgctaacattgaacggcttagccatgttgttttcaggattgattatccaaatggacgaagttgctgattttgattcagcccaaagtttagcagttgctaattcgactaatgccattattttggcaggaattattatgattttgctttttggggcattgtttttcgatggttgggctaagctcaagaacaggcatgctaagcacgttaagttagtttaatagaatagataagactagctctgaagtgagctggtctttttttgcccaaaattaaagtcttctttaccgtttttttacttttgcatgtgataatgagccaaaattaatcagggggatagttatgggattctggtattattatgttttgccattagtgacggctattttattcgtttggctaggaaaccgagttatggtgactaaaaaatggattagcataattttttactcattagctggagtaggctatttaattgcatcggtttttgctgttttttatatctatgcaacagtagaagaaattttaacgccagatattttaacaaaaataggttggcattatttttggagtgataattttatttttcttcttaccagcactgttctattaacaattagctattttgtactaaaacgtggtagattacggatgaaataggatgctcaaaaatgataagattatttttggaaaaaatagaataatgatggggtgaaaaaatgactttaccatttaaggcagttgctgtagatatggacggcacgtttttagatgatcgtaagcagtttaatcacaaggaatttgatcaaattttgactgaatttgaacaacgaggagtacattttatcgtggcttcagggcgtccttatgttagattgaagcaggactttggcaagtttgccagcagaatggatttcgtaactttgaatggctcgagattaatcatcaagggtcaagaagctggcagttatttgcttaatcgcgatgacgttttaaagctaattcatgatgtacatgtgaaatatggtgaaatggctacgatggtttttggccgagatattgcatatttgcatagcaatgttgaaaaagatgaacgcgactttttggcttactttgctggtaatagcactgtaattaatgactggaatgacttaccagataagatttatcagatcacatttggaatggacagttctaaggctgcagaaattgaacgagattttaattctaagcacgataaccagatttctgcttttgcttccgctacttttgccattgatgttaacacacaaggtgttaataaaggcgccggattaaagcatctcctagaaaagatggggatgacaggggatgacctgattgcctttggcgatgggggtaatgacatcgatatgttgaaatttgccaaatattcttatgcaatggcaaacggtatggacaaggtaaaaaagcaggcgaaatatattgcaccggccaatacggagaacggtgttttcaaagttttgcaaaaatatttagctgaagataaaaaatagcttgtaaaattaaattaatatgatatagttttaattaacttatagaaatagaggaaattgccatatgattcgtttactgaatctctaatatttgatttgttgtttagcaaaatactgtctttgcaccttgtttagtgcacccattttttgcttgcataccaagtattagcagtagatgaattgagggtggttttctttatcgaaatcaacctttatttgttgcactgttaataggatgtgagcatccagaacagtgctttttctttgcgacaaatcatgttagagatttttttgctgattatacgtttttgtcaaaaaagaatgaagaaaataatgggtttaagagattatattaaagctaaccgtcagcgggcaatgttagttctgtttttgattacgctaacgcaactgacaactacaatgtacacctacttaactagtccgcagttaaatgcaattgcaagtggtaaattcgaactgtttttggaattaatctttgtacaatttttaattggacaggtctgcaatgtcagttttaattggggaagtttacaaaataccaaacaaacacagacactttttcatcaggtaagacagcgaattatacgacattattatcagcagcctgaagacaaagtctcagagatggaaaatcatttgggaaatgacttgcagttagtgcaagagagttactataatgtttacttctattttgtttgtgacttaatttatattattttaactattggtacgctgtttacctttcattggatattggttgtctatacattattagttactttgcttgcagtagtagtgccgaaattgactgaaaaatataccaatcgagcaactaaagctgtttctatccaaaataagcaatttttgcagttgttagaaaaatggttcaagggtttagatgagctgcgacgctaccagaataaagttgttttgaaaaaggtggtgggacaacagagtcagaaactagagcagagtgaatatcagcgagataaattgctacattatactagcttagtgtctgcgatatttaatatagctggtcgtgttggtgttccatttattgctggaattttgtttttcaatcatcaggtaaatttaggagcgattctgacagcgggatattttgccaatggaattttttatagtgtagatagttgcgtgaacagatatacgcaattaaaatcaacgaaaactttgcgggatgatctggctaaattgcaaaagtgtttaccagaaaaagggtatgattctttaaaacaaatcgctaccgttcaaataaaaagcttgtcagtacaatatccaaatggtgaaagaattacttatcctgactttgaactgaagaatggtgaaaaggttgtattgactggtgattcaggtacaggaaaatcaactttattaaaagttttgttagggcaaattaagccaagtacgggtgaagtaatctattgcgataaaacaggaaaaaagatcaaacctgatttacgtcaattaggttatttggcacaggacttattgatctttcctggcagtattcaagaaaatattactatgtttaagcctaagcttaataaaaaaactgtacaagtgattcataagacggtttttgatagtgatcaagcgcgtttgaaaaatgggatagagacacagcttgatccacaacaggaattgctgtctggtggacagaaacaaaaggtagttttaatgcgggcgttgttgcatgagaagccgattctgtacttagatgaagcaactagtgcaattgatcaacaagcaacgacaaaaatcttccaaaacttaatgcaaagtagagcaacaattttggccgttgcacacaatttaaccgtagaacaacgagcattgtttgatcgtgaagttcacttggagggaaaataatgagtagcaaagaattatttaaacttaatccaattaaattctgtctggctatgggactacagattattgcagcagttggcgaagtagttgtagattatgtgttaactttgcaatttgatgctgccaaaaatagaaacttgagtttatttttaacttggacattaatccagctgtctagctatgtcatggtattcttattctataatttggcgggaatcatttggcaaaagttgattcaaaattacctgcatttaattcggcaagaactaacagatcattattttgccgatagtcaaaagcatgcggttagtgcagtgcaaaatcggatgactaatgatttgaaactgttacataatgactatttagattcgttccgctatgtagtagggatgctagccggtattgtcggtgtagcctttagcttggtgacttttcagtggagtttgttagttgcttgtttaatttttgccgcaattcagatttatttacctaaattactggataagccattacaaaaagctactgaaaaggtatcagtagctaatcgaaagtatttgaagactttaggtgattggttaattggcttatcagaagttcgtcgctatttggctagcgataagctttttaagactattgctgaaaattcaggacgcttggaagcagcaaatattgagaaggaaaaagtagatcaggaattagattatctgaatcaattggcttattcattaggagatgtgctaatctttcttttaactggatttttggtagtaaataattgggctgcttttggtttgattgccagcattggcaacttcaatggagcactatttggttctttgcaaggagttgctaattatggtggaagaatgcgagcaacaaagaaattgcgagaagagatttttgtagctaaaaagaaaattcagtctgaacagaaaagtaatttagaacaagcggttagtttttcaatccataatttagctatcgattttagaaacggtgaggccgtgactttcccagatttccaagttaaagctggagagaaaattttactaacaggtgattcaggtacaggaaaatcaactttactcaaattgattttaggtgaattgcaagccagtcgcggcaagattcaatactttaatcaaaagggtgaaaagattcaacctgatttagctgaaattggctatttgccgcaagatccagtgttattcccagtaacgattgttgaaaatattacgatgttcaattcaaaattgctaagtcgagttaaatcagccattgaaaaagttcaatttgcaggagatattgctaagttttcggccggcattgagactaagattggccttgatcaattgaatgtttctggtggtcagaggcagaaaattgttttagctagaagcatggtacaccagagtaagttgattttgattgatgaggcaacaagtgcaattgatcaggcggctacgatgaaaattttgcgtcagttgactaagacggatgcaacgattgtattcattgctcacaactttaatcaagaaatgcatcaattgtttgatcgtgaaattcatttaaagaaataaaaacaagctcataaccacaaagttacaggttatgggcttgttttattatagccaaatttgttcgaaaatatcttctttaaaaccgcaagttaaattactgtcatcaacgactaatggccgcttgattaacttaccattttttgacatcatatctgcagcttcttcaatcgtcattgttggcactttttctttcaaattttctctgcggtaatcttgaccgtgtgtattgaagaaatattttagaccacgatcttgatatttggtcatccattttaccaagtcttctttttttggtggctgttcaactaaatcttgaaattcgtagttgacctgatggtcatccatccacttgcgtgctttacgtgaggtagagcaacgtttataaccataaaatttaatcattattttccgtccttatttttgtaaaaattttctaaaaaattcaatttcttcatcatttgcgatgtcagctaattcatctttttgatcaacaaagaaaacatgaccacgtggattttcctcatcgccataagatttgcaaatagcatgaacgccgcggccgagtaagaagccaaacagggtaaattgcatgtcatgtaagaaatctttgttggcagtaatcaaaaaagttggtaggaaattatgattgatatatttttcaacatcgagttgttcatgatacttgttaactgcatttttagtgaagtaggcgctagccatgccatctaaattgcttggggttaacatgaaggaagcagcacaattcaagccgacagccctaaattttaagttcaatggtttgtaagaaaataacttggcataatctggattagtcaaaatagtgacatactgctcagccatttgaccaccggcgctgtcgccaacgataaaaacgttgttgcgatctagacgatattcttcagcgtgctcatcaacccaatgcatgtagcgatcaacatcgtctaattcatcagggaattccgcgttttctggtgcaagacgatagttgggattgatgaaagcaaaaccgcgcttagctaaacccattccataatattggtagatttctttagtaccataaacccaaccaccgccgtgaatattgatgatgacagggaagggagcttcgtgctttttgggtaaataaacatctaaagtatgccacttttcatctggaccataaggcagattatcaagacgttcaacttcagggatgtcgtgaggcaagccactgtcacgtttggtgtcatgctgatatgcaccatctctaaagtcagtaacaaactttttgattttatctttaagttccataattgttctcttttctaataattatctatgttaactcaattatactttaattgaatttgaaaaaataaaaacttttttgaaaaatcctcttgcattttaattaacgtttccctataatagtctatgttctgttgaggacgtacaaacatacaagatggtctggtagctcagctggatagagcaacagtcttctaaactgtgggtcgtgggttcgaatctcacccggatcataaattatgcctgtaagcattggtcttacaggctttttacataccttaggtatctatgtgctaaattttactacaaagacaatatttttttacatttgatattgtatgatacaaatatatgacaattattaacttaatcttacattattagtgaatcagttgactaaagtttggaacgagcttattctaaaattgatttccaaaaaataggatcgacaagtgtgaacgacaactatttttaacattatcggaggaattaagattgactacaaccaaaaaaatcattgttagattggcatgcgcgactgttcttggtacggcaggggtagcgctgacacaagtaaatataccacaaactgcagttgtgaacgctgcaactacctctgttgcagcccgcgcacttggagttgatgttgctagttatcaaaacgctgacttgtcaagtcatgcgcaagctggagcacaatttgcaattgttaaagttagcgaaggtacttcctatcgtaaccctaaggcatcaagtcaaatttcaacggctttatcaaataatatgatgccaatggcatatcactttgctacttttagttcaaatgcaagtgctgctgctgcagaagcaaattatgcagttcaagctgcccaagcattcggcttacctaaaggttcatatattgcttgtgattatgaaacaggttcgggcaataacatttacggtggtaaaacgccaacggctaatgcaattattgcttttatggacactataaaaaatgcaggctataagccacttctttatgctagttcatcagttttacaaaataatattgatactaatagtgtaattgccaagtatcctaactcattgtgggtcgcttcatacgctatttcaggtagaattgatagtccaaacttcaattacttcccatcaatgaatggcgtttcaatttggcaatttactgataattggaagggattaagcgttgatggaaatattgctgttttaccattatcaattgacggtaatgtaacttccaacaatggcgcaatttcacaagctccagctaccagcaacaccaattctgctagctcttcaaatgcttcatcaaatacttcgaataagagtacttcatcagatgatgataagggttcagcaactgctggctatgtgatgaagaaatcatatatctataataaaaagggtgagcgtcaaagcggctactatgcagcttatactaatattactcattatggtgtagtgactcttgataatggtaagactgccttaaacatgggcaatggtcgttacattatggcaagtaatgttttaggtaattcacgtgtacttaagcacaatgcttatgtatataataacaagggaaaccgcgctaactggagagtgcttagaaaaggtacgccaattaagacctatggttcacggatgcgcgttaatggtaaaagctgttaccgaatcggacgtaacatgtacgttaaggcggctaacttttaattaaaaaattgaatttatcaagaaggaattaagcttaaaggtttaattccttttttcatgccgttttttgtataattaaaagtattcaggaaacgcctgaattaattaactgatagggatgaaataaacttgaaaaaaagatttatagcaataatattgatgctactgactttaacgggttgtactataaaaagtactacgcctaagaaggctaagtcgtcagttaaaacggttaaagtcgataaacagcaatctaaggaaaaacaggctaagtatcaagtgatagaccaagttttgcgaattcaacaagatggcgttgatatttatggtcatatatatctaccacagggtttagctggtaagaagaaagcagtaattttggctcacggattggcaggaaattaccgtgatctaaccagttatgctaaatatttagctagttgtggctatgttgcctatacttttgattttcctggtggagctaagaatggtcaaagtagtggtgtagatcaattaaagatgtcaatttttacagaagaaaagaatctacagctggtattaaatacaattaaaaataggactgatgttgaccgtaaacaagtgtctttgctaggcgagagtcaaggtggagcagttgccgcaatgctcgcaagtaaatatccgcaagaagtaaagtcattgattttgctttaccctgccttttcgatcactgattatgcgaaagcggcttttaaatcagaaaaacaagtgccagacaagctcaacctatttggcttcacaattggtaaggcctattttgaaaacttgttcaagtataacttgttaaaagaagcaactaagtatcatggtccagttttaataatgcatggtacaagtgacatgattattccagattcttattcaattatggctaataaaaaatttaagcactcgaaattatacttatttaagggtgcaggtcatgattttaaaggtaaatatcatagtcgagcagatactttaattgataaatttttgcagaaaaatgggaaataaataatgaagaagaaataccttggtttattggctttattaagcctattgagcgtttttgctatttggggtcaaagcgttagagctgatgttgattatgatattgataatgttagagccatagcaagagttaataaagatggttcactgacaatgtatcgaacaattaagtattcatttgatagtgatgctcgtggcctttattataagcaaaatctggctgtaaaacagaagttgagcaacattcaggttaaggtcgatggacaaaatataaaggccgcaacaacgggcaaaaataatacgtataaattgcaaaagcagggcaattcttataattttaaggtttatcatcgaattaaggaaaatgataaggttaaagttgagtattcttatctaattcaccgggcaattactaattatcttgatacagctgagctgaactttaaaatagttggtaatggttgggatactgacttagatcatgtgcgtgctgaagtgatttttcctggggcagttaaggggctaaaagcttgggctcatgggccactaagtggttacactcaggttttgccaaaagagggcaaaattattatgactgctgatgatgttgcaggagatagtggtgtcgaagtacatgcgatttttccaactacggtaactagtgctaatcagaatattgttaaagaaaataagaaaagagcaattgaaaaacaagaagcagcattagcaaaagaagctaatcagaagcgtcagcgtaagcagatgcttagtataggattgatgatcatttcagtacttgtcggttttgtggtgataattagaggcttttttattaaaaaagttggggttaagccaaaaatagagcgcgatttagtacataattatgaaattccagatatatcacctactgctgcgcaaattttggatgaagctgataaaccaaatgttaaagcatttacagcttatttgatgcaattagccggtaaaaataaaattaagatcgaaaaatatcaaactaaacatttaaagcggactaattatcgaattactttagtagatgatagtgttttgactgatgacctattagattttatttttaacaaagttggtgatggtaagtcatttacaacgaaagatttgcgggattatacttctaaaaaattgggtaggcgttttgataaatggtgtgacgggcaatataagcaagttgaggataaggacttgcttgataaaaaatataaaaagcagcgtagcaacttccgaacggggatgctcatgggaatgattgctagctttgcgatctgggtaattagcttaatgatggcaaataatatacccagttttgtgataataattggaatcatgatgatcgtcttagaagttgctgcattcatagtgggcaattctcgtttaagtatttatacccaaaaaggtgcacttgagacagatcaagttcgctgctttaagaaaatgctagacgatattggtcaattcaagatgaaagacgtcggtgatctgattttatgggaagacattatgccgtatgctgtagcgtttggtctatccaaaaaggtattgaagcagcttaagattgaatttgcagatgaattagatgctgcaccagttctgttttatagtggattctatagtagcagtagtgacagttttgagcatagttttgaacgtagcttctcttcaggcgtgtctactggtttatcttcagtttccggaagctcaggtggattttcaggtggatcgtctggcggctttggtggtggcagcggcggtggtgctttttagtgagaaatttttatactataattaaactaaaaaaggagggctaaattatgccatttgtacatattgaattaattaaaggtcgctcagatgagcagattactaacttaatgaaggatgttactgaagcagtgcacaagaatactggtgcgcctaaggaacacattcatgtaattatcaacgaattaggtaagcatacttatggccaaggcggcgagtggagagcttaataattagaaattgtagtaaaaggcgactcgattgtgagtcgcctttttatatagttaaatatataaacttgtattagagccttaaagctatgtgtgcataaatgaattatttatttagaatcccacgtaatataatgatgttgatgtctagatatttacgaggaggatttgaaatgaatttaaaaaagaaaattgcaatttctgcaactgcactgactgttgctctctctactgcatttccaattgctgctgcgcaaagtcagccggtaaaagcagtaggtattgtattggttcatcgtgttacagcaggtgaaaatttcgctaattggttcaattggcttagaactcgataaatagaaaaattaggaagcaggcaatataaagattgtctgctttttgcgtaaaaaaatttaatcactaaaacgatcaatcaattaacactacttcataaaaatcagtataattatgttcgttactattagtaagttatacaataaaagtggtgagaataatgtatgattatcgaaataatatcaaaataattttaaataaaactgaggctgatgataaaagtctcgaaaatagtttaagtgcgattaaagctatcctaaatatggccgaagataatacagctgaaaaatctgagactaaatcagtaactcaacctaagaataaaattgcaaatacacaatcaattgcacaaagaaatgcagatttaaagcaaattaagcaattattgattgggctgacagccttaattgagactccaggtgatgaaaaagctaaaaagagttcacttgatgctttacacaagttgacgtttgttccaggcgttggcaagcgctatggcaatgttttgggtaaattggatcaggcaattcaaaaatctaagacaactaaagaagctgttaacaagaaaatttttgaagaagcaatgaagcccaaagagcaacctaagcgcgattatcgtaaaggacgccgctatactgttattcgggctttatcaggctgtaatttgattaatgatagtggtcaaattgtttaccgtattaaagaatcacaaattcactctttgaatttaaagagcggtgacatagttgaagctattgaaaatcgagataatccaaattatgaagcagaagtcttgcgcgtggtgggttatcgcaaattgcgcatgcgtgattatgacccaatcgaagaattccggtatgctgtggtccgcggcaaggccaatcaattagctatcactagaaatattaagggcgaaaagttgagaattcgcggtaaggatatcacgattccggttgattcaagttattatcaaggtgaaaatattcatgttgaagatggttcaattgtagatctagcttggtatacgggtgatgttcgcattaagaaaaatcctgctgaggcagtacagattcgttggatttatcaagttgatccgcctaagaaatcagatctgtcgtatcaaaagaaaaataagtcaaagaaagaagaaacagaagagttaactaaactcgacatgaatttgcactatcagcgggtgggaattgcgattggtgataatcaaaatgaaggaatattagaagggattgtttcgcgctataatgggatcccaattccaatagatgcttttgaaggcaagaagaaggtaatggaacggcaaatcaaagacttagatattgtaatcttgatgacagcttatgctgctcatgatgctacttggaatattcaggaattcgcttcaaagtatggtgttaaatttgccgtttcttcatctaaaggctaccgctcttttgagcgagcattatatcgagctgaaaatggtttacctgcttatgaaggaacgcaatcaatcgattataaagaagttaaaaataaataatttgttaacattattttgtttgcttgagctaacagatgatttttcgttaaaatagtactaactaaaagaaaggacgcttaataatgaaaaacattaaacaacgttcctggatgagatggttggtatttttagcaggacttgaaataatcgcaatatcaatcaatcttttttatggaccgattaatattgcagctggtggctcaacgggtatttctattctagtcgatgcggtctgggggattaatcgatcaattacagtatttgtagtgaatggcttgatgctgattttggcggcaatctttttaggcaaaaagactacccaaaatattgcattaggtagtttgctcttaccagttttgatggaagttacgcctagctttaaagcagtgaataatgacctactagccgtaatttatggtggtgcattaatgggacttggagtttcgctactttatcgcgttaatgcctcaagtggtgggacaacaattccgccgatgattctgaagaaatatttttatttaaatcctgcaactacgcttttatgcattgatatggtaattattttcttgaacatttttgtcgatggttggaatgctttcttcttagcagcattttctcaagtggtaactgccattacgatgcgctacgcggagaccggttttgataaaaagtatcaagtcagaattatgagtaattcagatttagaccgaattcaagatatgcttaaagaagattatcaaggcctgacgatttatgatgttataggtggatatagcgacgaaagcaagcgtcaattattaatcgtagttgatccacgtgaatatgggccacttatttctaaagtacatgagatcgatcaggatgcgtttatcattaccgaaaatgttgcaaaagtgcatggcggtcaatggcgaatgtaaaaaaataattgatcttagtctaaaagcgttgtatgatataagagttgtatttgtggagacctccacatctgcaaccgcacggcttgaggttagaagtcttcttatgtaagaagcaccccagttcggcgagtctaagtatttttttcggaggtgtacaaatgtacgcaattattaagaccggtggtaagcaatacaaagttgcagaaggcgatagcgtatttgtagaaaagcttgatgctgaagaaggtagctcagtaacttttgacgaagttatccttgttgctaatggcgacgacgttaaggttggtactccattagtagatggtgctaaggtaactgctaaagttgaaaagcaaggcaaggaaaagaaagttgtaactttcaagtacaagcctaagaagcactcacacagcaagtatggtcaccgtcaaccttacactaaggttacagttgaaaagattgaagcttaattcagaggtgaaatgaatatgaacattttaggtatgaaattatacgctcaccacaagggtggtggttctactgccaacggtcgtaactcagctggtcgtcgtttaggcgccaaggctggtgacggtcaaactattcacgcaggtactattatttaccgtcaacgtggtactaaggttcacccaggcaagaacgtaggtcaaggtggagacgacactttatttgcacttgttaacggcgttgttaaatttgaacgtcttggcaagtacaagaagcaagtttctgtatacccagctgaagaagctaagtaattcagagattaacatgaaaaggcgagtagcataagccacccgtctttttttatggctttttccgcccagaaacatgtataattaaaccaatatcatacaaaaagagggtctctgagatggaaaataggcaagaattattatccttaattaaccagcgaattgagcatgtaactgatttaattaaagaagcaaatgcagatgcattgattatttttaatcaagctaattatcgatatctaaccaattttacaggggaagaagcacaattaattttgactgctagtggcgaacgagtacttttatcagattctcgttttgctggacagattaaagcacaagcacctggcgaaatggatgttgtaatgaaacattctagtgattatgaagaacttactaaggccttgaaaaaaatggacgtcaagagggtcttagttgaaggtgaattcgtttcagcgagtgaatatgaaaaacttaagcaactaaatccagaacttgaatttgtgatggttgaagaattggttgaacgagtacgtaatattaaagatgatcttgaaattgcggcattgcgcaaagcaattgatatttcaatggaaagctttaaaggtattttgccgatgattaagcctggcgttaaagaacgtgcaattggtgctaaattggactacctatttaaagttaatggcggcgatggccctgatttcgatacaattgtagcttccggtgtgcgttcggcttgggctcatggcgttgctagtgacaaagaattgtccgaaggcgatatgattgtcattgactttggtagtttttatcacggttatgcggcagatattactagaactgtttcattaggtgaagttgatgctgaaatgcataaaatctatgatattgtacatgaagcacaacgccgtggcattgccgcggcagttgcaggtaatactggatatgatgttgataaagcagcacgtgattatattacagaacaaggttacggtcagtattttggacacgggatcggtcacggcattggtcttgaaattcacgaattgtgtcaaccagctttaccttttagaactactaaattggtcaataatatggttcataccgtagaaccaggaatctacttgccagacaagggcggtgttagaatcgaagacgatattttggtccatgatcaaacgcctgaaactttatccactttgccaaaggatgaattgatttccctataatagctatttaatttatcgtatttatggtaaaaacgcttcaagattggtaagataataattgtagaaatgagggacttaatatgacaatgatttcagtaaacgaattcaagaatggcttgactattcaatacaacaacgatttatggcgcattgttgaattccaacacgtaaaaccaggtaagggtagtgcctttgtacgttcaaagcttaagagtttgagaactggtgctgtacaagaatatactttccgttcaactgctaaggttgaaactgcagacattcaaactaagtcaatgcaatacttgtacaatgatggctcaagttatgtattcatggatacttctacttacgatcaattagcaattccaaatgaacaaattggcgatgaagctaattacttattggaaaacatgattgttaacgtagttatgcacgaaggtgaaactttaggtatccaattgcctaatacggttgatttgaaggttgctaagactgaacctaacatcaagggtgatacttcatcaggtggtggtaagccagctactatggaaactggtttagtagttaacgtaccattcttcattaacgaaggtgacgttttaactattaacactgctgatggtacttacgtatcacgtgcaaataagtagtttatttgaggtaacaaaatggcagatagttcaaaaattcttttaagtggtgaagaaaacagcgagcaaattaaaattgatccaagtgttctagaagttattttgggtattgctgcagaaaaagttgatggtgttgccggaatgcgcggcagtttgaaatcaggcttaaactgggttttcggtcgtgaagatcatggtaagggcgtaaatattagtgttgatgacgataataagctaattgctgatatttatgtttatcttgaaagcggcgttaacgttcctaaggttgcaatgacgttgcaaaagaagttgaaggcacaattattgcaaatgactgatcttgagctgaaggcaatcaacgttcatgttgtcggtttagttttcccagaagatgaaaatactgaccagactacatcagagctgtttccggaggacgaagaagaaaaataatgaaccaacacgaaagtcgaaaagttgctatgcaagccgtttatttggctaatcaggagccagatttaactgccgaagaagttgaagcaaaagtcgttgcaacgcttaatttaaaacagctttctgcctattctaagaagttaatcgaaggcgtactagaagatcgcaaaaatttacagtctgaactaactagtcatttgaaaaagggctggcgtcttgaacgtgtgagtcaaactgtggtagccatcatggaagttgctttatttgaaatcaagcatagcgatgaaattgatgctaaggcagcagttaacgaagctttaaatttatgtgacgaatttgctgagcctaaagaaaagccatttattaatggaatgttagcaaactttgttaaatagcgatgaatagccggcagttttgccagttatttttttacaaaaggagaacgggctttatgggaaagattcttgatggtaaagcatttgcaaatgaattagggcaaaatcttaaagaaaaagttaagaaattaaaagaagagggaataacgccacatttttgcgtaataaatattggggatgatcctgctagcaagatttatgttcgaacaaaaaagcggcgggctgaaaagatgggaattatccaagatatttatcaaatgcccgctgatactaaacaggaagaagttttagcattaattgataagctaaatgctgatcctgagattaacggcttgatggtacagttgccagcacctgaacagattgatgcagatgccttgttaaaaaggattgaccctaataaggatgtcgacgccttaacgcctgcgaatattggtcaactttggatggaaaatcactttgttgaaccggctactgcagaaggcattattgctttattgaaacattatcaaattacgctggctggtaagagagttgtagttattggtcgaagcaatatcgtaggcaaaccagtagcggcattaatgttagaggaaaatgctactgttactgtttgccatttgtatactaaaaatctggctgaaattacacgacaagccgatatagtagtttcagcaacaggacaagcatttttggtaactgcagatatggttaaagatggggcagtggtcgttgatgtgggcatgaatcatgttaatggcaaattagtcggagacgttgactttgataatgttaaagaaaaagccagctatattactccggttcctggcggtgtaggtcctcttacagtacaattcttaatggaagcagttgttaaattgactaggagacaaaatggccgagaataaatatttaacggttactgatttaaattattatattacgcaaaaatttaagaatgatccttacctgcataaggtcttcttacaaggtgaattgtccaacttccgttatcggcgtaattcgcaccagtatttttcactaaaagatgaaaaatctaaaattaatgtggtgatgttccgttccttctttgataaggtgaaatttaaaccagaagaaggaatgaaggtttatgtggttgggtatgtcagcgtgtatggcccacagggctcgtatcagttttatgctgaacaaatggaaccggcaggattaggtgccttatatgagcaattgaagcagttgcaggccaaattagccaaagaaggtctgtttgatccagagcataagaagaagttgcctcattttcctgatcgaattgcagtagttactagtgcttctggggcagttattcacgatattatggttacagctaatcggcgtttcccgcatgctgagattgatttgtatcctgcgcaagtccagggtgatactgcagcggattcattagtgagagcaatgcgccagattgccgctcaaggcgacaagtatgatgtcatgatcatcggtcgtggtggtggctcactagaagatttgtggccattcaatgaagaagaggttgtgcggcaagtttacgcaatgcagatgccagtaatttcttcagttggtcatgaaacggatactaccttgtgtgatttggtggccgatgcgcgtgcagcaacaccaactgctgcagcagaatatgctacgcctaatacattggacgaaattgcgcatattaagcaattaaccagccagttggtagctagcatgcaaaatattattcgttcgaaacgtgagcgcttaagtcgggtgcagaattctgtcatcctgcgcgagccgactagactgtatgatcagcagattcaacaagttgatcaattaaaacaaaggctgcaaaatagtatgcaaaatcggttgacccattctgtccaaggttatcaactgttgaagcagcgtttgtttagcgttagtccagataagagaatcggccagatgcagcaacaagagcattttttacagcaacgactgattgataatatgcagcactatttgaaaaataaacgcaatagttttacccaagtaatgcagcagttggatgactatagccctttgaagacgctagagcgaggttttgtttattcaactgatgaacaagggaaaaccattagttctgtgaaacaagttcaaaaggatgatcatttgcgattgcattttaaagatggacaagttgaagcagtggttacaaaggtaaaggaagaacaaaatggcagtgaagaaaaataattttgaagaacaattaactaatttggaacaaatcgtgcaaaatttggaaaacggaaatgttccgttggaagatgccctaaaagaatttcaggagggcgtaaagattagccgtgatttagaaaagaagcttaacagtgctgaagaaactgtggctaagttgattgatagtgatggcacagaacacaaattagatccaaataacgcatcagcaccagaggaataaatatgacagcatttacttattttaaagatgaatggaccccagtaattgatgattatctggctaagcatttggctagtgaggttgaagatcaaaagatcagtcagattatggcctactcagtgatgggtggcggcaagcgcttgcgtccgttattgtttttagctacgttaaatgctttaggcagaaagattgaagaacctgaaattaggattgcctgcgggattgaactgattcacacttattccttgattcatgatgacctgcctgccatggataacgatgactatcggcgcggtaagctgactagccacaaaaaatggggcgaggctgaggcaattttagctggggatgcgctcttgccgatgggaattcaatggattgcggaaggcagtaagtcggcgaaattggtagatttaattaccaaagcagttggccctaatgggatggttggcggtcaatatttggatattgattcaactaacaatgctagtgttgcgggtgatgccaagtttatcaataagatggaatggctgaagaccggttgcttaattcaggctagcgttgagatggctgcagtttatgcaggagctagtgatattgaacaggtaaaattagtcgattttgccaaaatttttggtcgttcataccaaatctatgacgacttggttgatgtcgttgaaactagtgcagaagctggtaaagctacgcacaaggatgaagctgaaggaaagaataatactttaactttgttaggaattgatcaaagtcgcaaagaactaactgacttaattaagcaagcacaagatgatttgcatggactaaatggcgaagtgctaactggctttttagatctttatcaaaaggtgttataaatggcaaaacaaagagcagatattttattagcagaacaaggaatttttcattctcgttcagctgcccaaagagcgattatggcggggctggtttctgatcacaatcatcaacgaattgataagagcgggactaagtttcctgaaggggaaaagttttacgtgaaagatgatggtaagaaatatgtttcgcgtggcggctttaaactggaaaaagctcttaaggtctttgacattgatttaacaaataaaatttgtttagatattggtgcatcaactggcggttttactgatgttgctttacaaaacggtgctcagatggtctatgccttggatgttggctacaaccagttagcttggcaattgcgggacgacccgcgtgtagtggtgatggaaaagcagaatttccgctattcgaagccggaagattttgatcaaggactgccagattttgcaatgaccgatgtgtcctttatctcgttagatttgatcatggcaccgatgtatgcaattttgaagaatcaatgtgatgccgtttgtttgattaaaccacaatttgaagctggccctgagaatgtcggtaaacacggtattgttcatgatcatgaagtgcacaaggcggtaatcgagcacaccatgcaaaaggcattggagatcggcttcaatgttttaggcgttgattattcaccaattaaaggtggcaaaggcaatattgaattcttgattcatttacaaaaagacgaagcaaatggtggccgcaacttatggcaagggagcccagctgaagtggttgagcgcgccgtaagtggtctataggagtgaagctatgctagttgagctagatatcaaaaactttgcaattattaaaagcttaaaggttcgttttcaagaaaaaatgacggtaatcatcggtgaaactggtgctggtaagtcaattattattgatgctgtttcattactgatgggtggtcgcggtcaaaaagaaatgattcgttcgggtgagtccaaggcgattattactggcttgtttgaattggatgatcaaaaagaaaagatcgcggaattgtgtgatcaatatggtttgccgcacgatgacgatcagctggtgattagtcgtgaattagctgtcaagggcagaaatgtagtccggattaacgggcaattgacgacgattaatgttttgcgcgagattggtagctatttggttgatattcacggccagcatgatcagcaaattttgatggatcaggaccggcagattgacctagttgataattatgcccctgcttcttttaaggcagatttagccacttatcaaactgattatgctcaatggcaaaagctaaccagtcaattgctgcacctgcgtcaagatgcccaagaattagctcagaagcaagatattctgcagtttcagaataatgaattggaagcagccgaccttgaggatccacaagaagatgagaaacttgaggaagaatataacgaactaaataattatcaaaaaattgcggatacggcgaattacttcatgcaattgtatgatgacgatgagcatggaattgcaactttacttggagatgcgcaaaatgctgcgactgatttaactgaatttggttcaaaatttaaggattttgctaagacagttgatgatggagtttatgctttaaatgacgcccgcagtgaattatcgaacttaatggatgcaatggacttcgatgaggaacgttttcaatacgtgactaaccgcttggataccttgaattcattgaaaaagaagtatggcccaaccttggctgatgtgtttgctttttatcaaaaagtacaaaaagaactcagtcaatttgaaacaggcggccttgatgaggaaaaattgcaagcagaagttgccaagattgaagaaagaatgacccaagaagctagagatctgcatttaatacgcgaaaaagtggctcattctctggaagagcagattaagcaagagttagctgatctctacatggaaaaagctcgcttttctattaattttgatgaaacaaagacatttaccgataagggaactgatgcgattgttttcttaattgcacctaatccaggtgaagatttaatgccattagttaaaattgtttctggtggtgaacaatcaagattgatcttagctttgaaggcaatcttcagccgagttgaaccagtgggtaccatgatttttgacgaaattgatacgggagtttctggccgagtatcggctgctatcgggaaaaagatgcactcaatcggtcgcaacaagcaggtaattgcaattacgcactcaccacaagtggctgccgcgggtgatcaacgctacttggtagctaagcaagtaaaagatggttcaacctttactcaaataggcccacttagcaaggaagaaaccattacagcgattgcacagatgatggctggacaagatgtaaccgatgcagcaaagaagaatgctgcagatttgattaagagtattaaagatgactagtattagtaaattttggcgtgatttttgtgtagaacatcaagtaagtcctacagcattagaaggtgcttttgcttttggagctaatagccgggatgcagatattcttagtgatttggtcaaaagtggaattaagacggcaacgactagcctgtattctgcgcaagaagatgtaccggttgtagggatgtacgcaattgttttaaatggacgaaatgaaccagtttgtgtgattcaaaataagactgttgagattatgccatttaaaaatgtctcagctgagcatgcctatttagaaggcgagggcgatcgctcatatgaatcttggcgtaaagtacacgagaaattttttgcgcgcgaatgtcaagaactgggacgagagttcacagatgaaactgaagtagtgtgtgagacattcgagaaaataatttagtaaaggagcagacgattttgtctgtttttttgtatgcaaagagaaaacttgaaaaagaaacaattttagtgcaaactagatatattacaagttaagaggagttcagcatggcagataaaggtttattacttgtgctttctggtccttccggcgttggtaaaggaactgttaaaagcgcgattgttgaaaacaaagtctttccatttgaatattcagtttcaatgactacgcgtcaaccgcgaccaggtgaggttaatggccaagattatttttttgttagtgaagatcgctttcaagaggctattaaaaatggtgagttgttagaatataataaatatgtcggtcactattatggtacacctcttgcaccagtgaagaagatgcttcatgatggcaaagatgttttacttgagattgatgttaatggggcacaaaaagtacgtgaaaagatgcccgatggcgtgtttatctttttaaccccaccagatctacatacgttacatttgcgtttggaacaccgtggcaccgagtcagaagatgtaattcgtggtcgaattaagcaagcgcgcaatgaaattttggagatggaagactatgattatgcagtagttaatgatacagtagctaatgcagttgatcatattaaagcgatcgtcgatgcagaacatgtcagtgttaaacgtgtaattgatgactatcgtaagatggtcaaggaggattaattattatgagaattacttacccatcaattgataaattattgtcacgtgttgattcacgctattcattatctgttcttgccgctaagagagcacatgaacttgaagctggtgatccaccaactttggaacattttaagtgtgataaggctgttggtaaggcacttgaagaaattgctgctggtaaagttactgttgacccagctcatgccgaggttaacctcgaagattaatttattgaccttcatcctttggggtgaaggtcttttttacaggtgattaaatgattgctcaggttattgttgatgtagctgcacggcaaacagaccgtatttttgaatatcatattccaacagaattagaaaaggatattgcgattggatcaagagtagttgttccgtttggtcctcgtaaagtgcaaggttttgtggtggggatcactgatcaaagtgaatttaaaggtaaacttaaggatttgctagttgtggtagatgagatgccaccgcttacgccagagttggtaaagttatctgctgatttagcaaaaaatattttttcttaccgaattaaaattttacaagcgatgctaccttgggtaatgcgagcaaattatcgcaaattgctagtgccagctaatgatagagctgccaaaatgccgctgtttcagggtgatccaattgatttaaataaaattacggatctggcggagattaagcaattccgcaaattattgcaagatgatcaagcaaagattgagtatgtggtagaaaatcgagccaagaagaaaaaagaaaatcaatatgaactagcattaaaaaaagaggaatatcccaaaatttacaatactttacgtcaaaatgcggtaaagcaaaaaaagttattgatggatatcattgataatgcagcggattatcccaaaagccaaagccagctagaaaaacagcttggattgacggcggcgagtttgaattctgcgattaccaaaggttggttgaataaaaaaagtgttgaggtttatcgcgatccgttatccggatttgatgacggagaacataaaacagcggttaccttaaatggtgagcagcaaggtgctttgaaccagatcacccaagcaattgaacagcgccaggctgagacttttttgttggaagggattactggtagcgggaagactgaagtgtatttacacgctattagcaaggctcttaaacaggggcgaaatgcattaatgctggtgccagaaatttccttgacgccgcaaatggttcgtcaggttaaggcacgttttggtcaagaggtagccgttttacatagtgccctatctgagggagaaaaatatgatgagtggcgccgaattcgtcgtggcgagactaaggtggtcgttggcgctcggagtgcagtttttgctccactagataatattggtttaatcgtgatcgatgaggaacatgagtcttcatataagcaagaaaccgatccacgttataatgcacgtgatgtggctatttggcgtagtaaatttcataattgtccgttggttttaggaagtgcaacaccatcgttgagtagccgtgcacgcgccccaaaaaatgtctatcatcttttacggttaactgaaagggctaatcaaaagaaattgcctaaagttaatttgattgatctaaagcacgtgcagtttgctggtggtcaatttgatttatctgttgagctagtagatgcaataaaaaagcgtttggcaaaaaaagagcaggttattttaatgctcaatcgacgtggttttgctaattttatgctttgccgtgaatgtggttttgtattaaaatgtcctaattgtgatgtttctttaaatttgcataaggatactaacagtatgcaatgtcactattgtggtcatactgagccagtacccacacgttgtcctaattgccaaagctcgcaaattcgttttttaggtgcaggtacacagaaggtacaagaagaattagaagagcttctgcctggtgcacgaatcttgcggatggacgttgatacaactagaagaaagggtagctataagaaaattctagatgcctttggtgctcatgaagctgatattttgttaggtacgcaaatgattgctaaaggattagatttccctaatgtaactttagttggagtaatcaatgccgatacaggattatggctttctgactataatgcttctgaaaagacttttgaattattaactcaagtagctggccgtgcaggtcgtgctgataaggaaggggaagtcttaattcaaacttataatccagagcattatgctattcaactagctcaaactcaggactacgaacgattttatggctatgagatgaatatgcggcatgctggtaactatccaccatatttttataccgtgctgatttccattgctgctaaaaaagaacagaatgcagctcgtgaggcttttaggattaagaggtatttgaatgagcacttgcatgagccaacgattattttgggaccaacgccaagtgcaatttctcgtgtaaaaaataaatattattatcaaatactggtaaaatataaaaaagaaccaaatttaaatgaattattacaccatgttcaagattccgcgcaggaagctaagaaatatggtttaagtatttttattgataatgaaccagagagaattatgtaaggggatgctttaatgacatcaataatatttatgggaacaccgaaattttcagttccagtacttgaagggttaattgatgaaggctatgagattaaagccgtggtcactcaacctgataaaaaggtaggacgtaagcagaaaattactaagtcaccagccaagatcgcagcagaaaagcatgatttgccaatctttcaaccggttaagttgtctggatcagacgaaatgcagaaattaattgatatgcatgcagatttgattgtaactgcagcatatgggcaatttttaccaactaagtttttgaattcggttaaaattgcggcagttaatgttcacggctcacttttgcctaaataccgtggcggtgcaccaattcaatattcactaattaacggtgataaagaaactggaattaccattatggaaatggttaagaagatggatgctggtgatatttatgctcaagaagcaattaagattgagcctgatgataacgctggcactttatttagtaaattatcaattgttgggcgggacttattgcttaagactttaccagcaattattgatggctcaattaaaaaggttccacaggatccagaaaaggtcgtcttttcacctaacatcactaaagaacaagaaaagcttaatgttgatatgacagcagaagaggccaacgatatgattcgtgctttgaatccagatcctggtgcttatttgatgattgaaggcaaacgtttcaagatctggaaggcagaaattgcatctgattcatcaagtttaaatgccggctctgttgttgctaacaaaggacgttttgccattagttttgctgataattcagtacttaacttacttgaagttcaaccaagtggcaaaaagagaatggacatcaagagctttttaaatggtcaaggtagtaagtttgtcccaggtgaagaaattgtcgatcgataagagtgcacgtgcagtcagcttagagacattgatcaaggtcttagatcaaggctcctattctaatattagtttgaataacagcttaaagcactctaacttgtcaattgcagaccaaaatttagctactaatattgtttatggcacgattcagtatcgattgtttttagaatatcagttaaaaggcttagttaggacaaaactgaccgaaaaatatattaagccattattgttaatgtcactttaccagttgatttttttggataaagtgcctgatcgtgctgtacttgatgaggctaataaacttgctaagcaatatggcaagcgacattcagctggctttcggttggtaaatgggattttgcgttcgtttactaggcgcggggtgattttaccagctgaaaataatccagttaaatatttaagtgtcaaagagagcgtacctgaatggttagttcaatatttaattgataactggggcctagacaaggcaaaatcagttttaaacagtattaatgagccagctaaaaacagtgtacgtatttcaaagttggcagataaagagcaagtttttgcccagttagagcgggataactatcaaccacaatggtctaagttatcaagcgatgatgtgattttgagtcacggtggcattagcgaaagtgatttgtttgaagaaggcaagttaacaattcaagatgaagctgccagtttagtcgtagaagcttttgactttgaacaagatgagcatgtgcttgatgcttgttctgctcccggtgggaaaaccgtgcaaattgccgaaagcattgttaatggtgatgtgactgccttagatattcatgataaaaaattacgtttagtacgagataatgcccagagaatgcacgttgcaaataaggtaaagactaaggcatgtgatgcacgtaaggctacagagatttttgcggcaggtgaatttacaaaaattttagtcgatgccccttgttctgggcttggattattgcgtcgtaagcctgaaattcgctatactaagagacaacaggacttacaaaatttacaaaaaattcaattggcaatcttaactgcagtaagttcactcttaaaaaagaatggcgagttggtttattcaacttgctcaatttcaatggaagaaaatgaagaggtagttaagaagtttttgcaagcacatcctgactttgaactagttccatttaagttaactaaacttgaatcaaagacagggatgttgaaaataatgcctgatctagatggcaatgatggatttttcattgctaaatttaagttacgaggttagatttttgattgaaacagcatacgcttcgagtattggtaaggtacggaaaagcaatcaagattttgtaaaagtttttaaaaatcaaaagggaattgtcttagcaattgtctgtgatggtatgggcggccatcaaggtggtgacgttgcttcaacaatggcagtcacccatttaggacataattttagtatgactgactttgcagatgctaatctcgctcataaatggcttgatgtgcaattaaattctgaaaatgaaacaattttaaagactgctgataagtttcctgacttaaatggaatggggacaacgattgtattggcgtttgcatttgataaaaatgccttaattgctcatttaggtgattctcgggcttatagttattctgaaggtaaatttgtccaattaactgaagatcattctttggttaacgaattagttaagatgggtcagattactaaagaacaagctaaacaccatccccagaaaaatattattacgcaagcattaggcgtctcaagtacgattgatcctgaatttgatgagatcaagatgggggaaaacgacattattttgctctgtactgatggcctaaccaattcacttagcgatccacaaatccaacaaattttggcaactaaggagcttagcttaagagaacgttgtaataaattgattagtgaggccaatcgattaggtggtggtgataatattactgtctgcttaatttggaacaaggaggacgagagcagtgatcgataaaggttatctgcttggggaacgttaccgcatcatcgataccttaggtgaaggcggaatggccaatgtctatctagcggaagatattatcctgcaacgtaaggtggcagttaaaattttacgccttgatttgcagaatgaaccgcaaacccaagctcgttttcaaagagaggcattagctacaagtgaattaagtcatcctaatattgtttctgtacttgatgtaggtaccgatcatggtttgccatacatggtaatggagtatgttgatggtcctaatctaaaagaatatattcaaaaaaattcacctttggatttaaatgaaattattcgaattatggatcagatattgagtgcagttgcattagctcataagcacaatgttattcatcgtgatctaaaaccacagaatattttgatggataagcgcggcaatattaaaatagctgatttcggaattgccgttgctttgaatcaaagctcgattacacaaactaattcagtaatgggttcagttcattatatgtctcctgagcaaacgcgtggcggaatggttactaaacaatctgacatctattccttgggaataattttatatgaattgatcacaggaactgttccgtttaacggtgatacaccagtggcaattgcactgaagcatgcgcaagaaccaattccttcaattcgcaagaaagattcaagtgtaccacaggcgctggaaaatgttgttttaaaggcaaccgcgaaagatccacgagatagatatgctacagctcaggaaatgaaagcagatttggatagtagcttggatcctgaacgggcagatgaaccggtttttgtaccatatcatggtaataacgatgataaaacaattgtattgcctggatttaagccacaaaaggaagaaaaagaagtggtggagccagcaaaaaccgaatcagtagaatcaagcaagctagtaaagaaaaagacttttttacagaatgtcaaaagtcacaaatggtggtggctgatctcaattattgccgcgggtttaatcatttttatgatgattttcgctttaagtggtactggaaataaacgacaggatgttaatattcctgatgtaactaatattgcagaaaaagcagctgagagtaaacttgaagcagcaggcttacaggttggaaaaattattaggcgacaatcagatgatataaaaaaaggccgggttattgcgacaaaaccaactgcaggcaatagtctagagcggggaaagagcgttgatttaattgtttccagcggttctagcatggttaaagttcctgatatggttgggaagaactatgccgaagcggcagaaaaattagaaaatatgggctttaatgtagttagagaggaccaatattctaataaagttgacgaaaatcaagttatttctcaaagcattgctgcaggtgtagaggttaagccgacgcagactacaattacgttgatagtttcacgtggcaagcaggctagatcacattcaaatatggttaccttgaaagacttaagtaattattctttgaagagtgctcaagactatgccaaagaacatggcctgactttacaaatcaatcaagaatattctgatgatgttgagaagggcttagtaatttcgatggagccaggtccgggtactaaggttgagcgtggttcaactgttaccatcaagatctcgaaaggtccaaaggaagacaaggaaactactgtaactaagacctttaccgttaactatgttggtgatgatctttctaagagtgagaagcctgataatgataaaggaagcaataactctgagtcagaatccgttaatggcaagggtgatcatgtccagatctatattaaggatgatgatcattccttgaacaatatttatcgtgacttgtatattaagcatgatatgagtttctcgattccatttaacattagagaaggtagtggacaattaaaggttgttcgcaatggcgatacagttttgaatgaaaaggtgactaaataaatgaaactagcgcaaggaaccgtcgttggtttgattgctggttattatgatgtagaaaccgctgcgggtatcgtgagaacgcgtgctcgcggcgtttttcgtcaaaaaaagcaaaaaccggcagttggcgatcatgtggaaattcagatagatgataaaggaatgagctatctggtgaaaatcttgccgcggattaatcgaattgggcgaccagcagttgctaatgtaagtcatgttttgttagtaatttctgcagtagaaccggatttttctgtagagctgttagatcgttttttgactttcttttcttggcaaaaagttggtgtaacaatttacttgtctaaagcagatttgctatcagaagcaaagttaaacacaatcaagcaagctttagcatattatcaaaaaataggttatcttgttttcactgattatcatgaaatgcaaattcagattcctaaaatgatcgaaaaaaatcaaatttggactttagcaggacagtcaggtgctggtaagtcaactttgcttaaccatttaaaaaaagatgctaatcaagcgactggtgcgatatcaactagcttgaatcgtgggaaacatactactagaaaggtcgaactttttaagttaggcgcgggctttttagcagatacgccaggtttttcgtcaattgatttgacaccaatcaagttgaatgagttatgtaattactttgttgagtttaaaaaggcaagtattcactgtaagttccgcggatgtcagcatttgcaggagccaggctgtgaagtaaagaagttacttgaagccagagaaattctggaaagtagatatgaggattatttggctatgcggactgagattagcgaaggtcgcataccggaatatttaaaatagaggtaatagctgatgatgattgcaccctcaattttgaacgcaaataatattgatcttaaaaatgatattgaaaatgcagtccaggccggaattagccgttttcatattgatattatggatggacattttgtgcctaatttatcttttggaccgcaactaatcaaagatttcaagcgtgaatttccgatgacagatgctgaaattcacttaatgagtgatgccccagataagttggtaccagcttttgttagtgcaggagcagatttggtcgaactacactatgaagcaatggacaagcctaagttatattattggttcgattatttagcttctaatggcgttgatgctgctttggcaattagtccagatacaccagttgaagtggttgaaccgtatttgccattactgaaacaagtattagtaatgacggtcaagccgggatttggtggacagagttttcttcctgaatcagttaatcgaattaagtcagttagagagattgtcggctctgattttgatattgaggtcgacggcggtattaatgatcagactattaaattagctgaaaatgctggcgctaatatatttgttgttggttcatacttgtatgaaaatggtgatgttggcagtcaagtacataaattagaaaagattattaagtaatgaaagcatatgcattgttgggcggtccaactgaattgtggcctgaagatattgaagaaaagctggctcaagctgatttagttattggggttgatcgtggtgccttgtttttagaagaactgggaataatacctgatgtggcagtaggtgactttgattctttacacgaaaatgacttaagccaaatagaaagtaatgttcaagacattcgttattctaatcctgtcaaggattggactgattctgagctaatgttgcagattgcttttgaagattatcatgtggatgaattagtgatttttggtgctacaggtggaagattggatcattttttgatcaatctattaatgttgctaaatcctgaaatgagattatatgcgaaaaaagtaacgttgattgaccaacaaaatctaatttgcttttttaatgcaggcacgcatgttgttcaaaaaagaaaaaattattcttatattggttttgcagctttaaaagcaatcgaagattttaatattattggtgcaagatatgagttgaagcactattctgggaactatcctcgtgttttttcatcaaatgaatttttgcctaatagtaatgaattcaggattagcttgcaaaatggtatgattgcagcaatttattctaaagatattaatcgttttcatgatttataggttaaaatagaactatagaaaagaaacaagggaattcaaatgaaatatattgactttgaaaaagatattgctggtttcgaaaacggtcgctacgaagcaagacttgaccgtgcaaaataaaatgtagaagactacatgtacaagaaccacgttcacatttttgataaaaagaagaagaaggaagtagctactatcaatggcttagctagaaatgtaacttatcaagatttggacttgccaactaaggtgggtgaaatgattactgagtatgcatacacgccaattgatgaaagaatggccgacgaaattcctgatgacgataagcatcacaatattatgaagtaaagtaaaacggtaagaagacaaaataaaatggtcttcttaccgttttttatataaatcattaaaataagtaaaaaaataagcttgcaagatcagtgatctaacaagctcttggtctattaggcacgagtaactttaccagactttaaagccttggttgaattaaaatataggtttttagaaatatttataagctttaaatcgttgatattataggatttaatgttttgcaatatcatagaatttttcacggtgttgcacaaatgttgcacaaacttgattgagtgaattaataattttggcatcttgttgatccttatattcatcaagtaagtgagcatagattgataaagtgattgctatattagcatgtcctaagcgtttactgatagcagctatatcaattccttgagaaattaagtatgaaacatgggtatgccttaaactatggaagtgaaaatcaggtttgttaagtccaatttccttaatggcttttcttaagaattgatttacagcagaactagaaggtggtaatccagttctaggaatagcaaaaataaattcagaattattaatttttaattgtttcaatttatctaataagaaagaattaactttaatctttcgaactgaactttcggttttagttggtcctagtatttttaaattaggattccaggttttattaatatcaataattttattcttaaaatcaatatcagtccattttaaagctgttagttctccaagtcgtgcgcctgtaaataaccccgctagaactaaatatttgctagtataacgaggagttaaatttgttaagcataattgtaccagcttattcatttctccttcattaaggtattctatggctctgacattgtcttgatttcctgtgatggttgtgcgattggtaaaattcttaacgattaaaccatcctctattgcatttcctgcacaagctttaaccataatattggttttacgaactgtagcaggagcatggtttttaccaagccaatttaagaagctttgatatttagctcttgaaatatcttttatttttgttgatccaaaatatttttcaagataatgataattggtaatatatctcttttgcgttgattttctgataatcgggaatttaaaagtaagataccagtgttcaaaatagtcagcgaacacagggttcttaactacatctacaccatcaatagaagcggcttccattttaattccgtactgttgtgcttcagacttggttttgaaaccgccttttgatttttgttttaaaatagaaacattcttttgtttttctggatcccattgagtttctctctttgaaaatcttacataccaggttttgccacgttttcttattgatgccattttatttttactcctatttttgctaaaatagggtagacgaaataagccgattccagtcggtttatcgttactctattacattataagtattattaagtttattgagttgcgctcacttactgttccagcagtaggtgggcttttttgttttatagattaattccacttatagttatcataaacatcaaatgtggaacgtcccatttcattattgtcatcgtcaaatatttgtgcccataaacgattgccaactttagacttactaattaagccataatgataagcatcccatgtagcttctttgttaataccacgcatgcaagtagtcttatccttgtcagataaattaacaaaacgatcattaacttccacagataagttagctttggaattaacagtaactttgcttacatattttgaccaattagtatctggatcatttttagaacggaaagccttaatgtttttaacaattaaagcattagtttggttagctttctgctttttaattgcattgctttttttagccttttgactttcaattctttcttgtctctcaatatttgcggtgctttgctcattagaatgtcttatccataagaaccctcccactaaaaccgcaattattataataaatcctattgcacaaccaacagaaccatctttattgtcttcttttttatcagtcatttgttttggctccttatttctttcaggtttaacgtcactgtggacgttttaaaacacaacagggttatgcagactttgaatacaatagcttcgacaaatatccatttttatcgtgttattatttctaaatgctaatgtatattccaaagcagcattaattgacattccaatagtataatgcaaaaagtttttaagtctgttatgtaatgctgctgagctcattccataaatgtctttcatttgattaaatgatttattcataatttctttttttaatgaatcttctggaacataaacatttgaagcaattatattagcttctgtttcaatgggctgaagctcttcaggataaggatttccttggctcttttgcgcatttattaaagcaacagaacttttatatgtggggtcgtctaatgcttgataagcatgtgaaagctcatgaataatagtaaatattattcttccccaagtattaatacttgcatttaaaaacataattggtccactagcgggaaaaagggtaaagccgcagactctatttgcaaaagtagtacttacttcatcaatagattgcgctgtaaatgaaatatttctagcagttaatccataattaaaatcatttaaagcattttgaccattattttcaaaagggaaaattaaattaggtgtataagcacatatatcgcatgtcccgattatcgaataaagatagttaataaccattggataccttacctctgatttaggtacattgtattttaaagcagtatcttcaactatagaattagcaatatcattgctactttcatatgaatcttctggtattaatctatattcgtatccaggcatattatttttcactctttctacgtcttttaacaatttgctttgcagtgttcatcaaaatacctaaagaatcttgaaaatcttgtttttcttcatttgacattccatcggtttcttttctaaacattgctaaaagttcttgatcatttttgttcagcgttacagattcatctgtaacatcatctaagacttcacttaatggtactttaaaaaaatcagcaaccttttgtgcactagccgttgaaggctttttcgtttcccatttgctgatgattccgttacttaaatccatttttctttctaattcagctactgattttatatcaggtcttctttctttccaaagcctcattacattgtctttcgcactcattttatactcctttattttgacacgacataagaaatagaacaaaatctaaaataaatgcttgcaatttagaaaacgggctattataataaaaactgttcaaaggaaacatagcaaaaaatcttttgaaccgccttttgtaagcataggtcttacgatttggcttatttcttatactcatataatagaacaaattctattataaatcaatataaaatctaagaaaggagtctaatatgtcactttattcagtgattaaagacattgcaaaggaaaaacacaagtcaatttatcagattgaacatgacttgaagatgtccaacggaatgatcagcaaatgggatagaagtatgcccagagctgattcattacaagatgttgctgactacttaggagtaacaacacaatttctatttaagttagctagagaagataaggaggaaaagtaattatgaaactcttagattttgaaggtcagtcagttttagacagccgagatgtcgcaaaaatgattggtaaagaacacaagaacttaatgcgtgatattcgtacttacatcaaagatatagaggagagctcaaatttgagctcacgtcagttctttattccaagcacttataccagtaagcaaggaaaagtattacctaattatctgctcactaaacagggatgcgagttcgtagcaaataagatgactggtaaaaaaggaaatcaatttactgctcaatatgtgagtttgtttaatcaaatgaaacaacagattgaaattccaagtaaattcaatattcctaaaacattgcctgaagctttgcgtttagcagcagatcaggcagagcaattagcaaaacagaaaccaaaggttgattatttcgactcccaaatgagaaaccctggtcttatgacaactaccgaaattgcgaaagattatggttggtcagccaaaactttaaataaagagttgaataaacgtcacattattttcaaacaaggtaaacattgggttttatatcaaaaatatgctgacaaaggttatacgcaatatgaaccatatgattatcaaaaaaataatggtcaacatggagttcacaacaatcttaaatggactcaaaaaggcaagaaattcatttatgatctattagctaaagatgatattcatcccgttgcagaacaaatgaacttgttagaagtataggccaggtgatgacaatgcaactagtcattaatgacactgaacttcaaaaagcagttgatcaaattatgaaagaacgtggctatgtccctgaagagcaactgcaaggaagaacaatcagtattgatgaatttgctaagaaatacgctaagccacacggacaagcatgggtaaaaagaaatattctttatccatttcaaccggattggtgtagcaatattcatccaggcagaggcggtaagatgacaatctttgaatatccagctgctatttggatgaatgaacatagaaaggaaattgattgggatgctaaataagaattattaccgtgagtttaataaaccaatccaacataaagaaagccattatgaaactatctttggtggcatcttaatagcagtcgtgatcttaacgttcactcttttgtgctatggcttttgggatgcagcatttcaaattattggaggttaactcatggaacttagcaaagaaacacaacaacgaatttgggcaattactgatgtagttactagtcagtacgaaacagggagaaaaccatcatggaagcaaaacaaggaaaagaattagctaaagaactcaactaccaaaagattgaaaaacagcgtgatttttatgctggttgggattgcttaacggtagttgtagggaatacagttcatgcaattggtcagaattgtgagtacagaacaccacttgattttattgaagaacagttagctgatgacgctgataaattcatggttaaaggtcaattcacagatgcaaaggatatgtatcagtacttatttgaaaactgtgataatcgtgaagaattaaccagcttcctagaagactattttgacggaatggagatggctgactatggaagataaggatcttaaagactttcaagattggattaaaaaaatgcaagatgatgcagacgattgggtaatttatttagtctatcaatctaaaaagaatggcaaaacttactctggcgcaatgcgttggctgaataaaaataaaccagatttgccaggtaaatttactgctagcccaagtgaggttgtagcaaatgtggttcgatcaatttatgaagaagcagtaattaaggtccgtaatgaaggtttagataaagaggtagataacgatgattgatcaagattggttaaaagatagcattaagcaagaagcgaagttaaagtttgctgctagatgggaaaatgcagaatttaattcatccgaagcaagacaagcttttcaagcaattaaaaatactgatgagtgggaagcattcaagaaagtaatgatccaagcatatgaaaaagcaattactagcaatgtccttaatcagcttcagggcattaaaaatttgattcgcgatgcaggtgaagaataatgccagcatttaaatggagtgaaaatagaaagcctaattatagatggcttgtctacggtattgctggtgttggtaaaacaacattgagtaaatatcttaaaggaaaaagttacttgcttagcttagataaaagctttgaaagagtgagattttggcaaggtaacgatgatatttgggttctggatccagaccaaccaatcgaagacttaaatgacttttatgatttttttgatcctagtcaatatgacaacctagttgtcgataatatcagtagtctgcagaagttgttttttgtcgaaaaggctaaaggaaccaaaacaggattagctaacaagatttctgattataatgaatggaatacatatttaattagatttatcgctagcgtttttaaatggaacatcaatatcttagttacggcttgggaagcaaagtaccaaattactgatccaagtggtcaagaatttacgcaatatggtccagatatcagagataatccacgggattatttaatgggtagctgtgatgtggttgcccgtatgatccaaaaaccacagtcaggtgagcgtgggttaatcatgcagggaagtatagatacctatgctaaaaaccgcttagacgagcgaaaaggcagcaaagcagaagactttttcaaatttgaaaagtcggatttagaaaaagcggtcgataaagttaaagaaaatgcaaaggagaaacaataatgtttaacaaaaatgtaaatgaagacttaaagctaaaccaggaaatggaagacaaagttgcagaaacttgtttgaagattactaataacgaaatcaagcattttattatcattggtttagatgatgatggaaatgaaattcgaatgcatcatggtcatggcattgtattatctggtctcgttagagatattcaacgagagattgatcaagaaaatgatcataccagaaatgccagtgattttatcaagatgatgcagaaaattaataagcaagatgattaaatgtttcaattatttgattatcagcaagatttaattgataaggctagaaatgctctagcagctggaaatcaaggcgttttaattgttagccctccaggatcaggtaagtcagtagtaatcagtgaaattgctaaattaacagtaaaaaaaggtggccatgtattattctttgtccatcgccaagaactagtaaagcagatcaaagattcttttaaacagcagggtgtcgatttaaaccattgcaccattctcacggtaggtaaagtagcaaatagattaaatattttagccaaaccagatttaatcattgttgatgaatcacaacactcaagagctaaaacatatcagaaaatatttaattattattctgatgttccaaggcttggttttaccggttcaccatggcgtttatctggtaaaggatttaaagatatttattcagctatggtattaggcccaactgctaaatggttaattgaaaataaaaaactggcaccatttacagtctatggttaccagttaggtgataaatcaacgttaaaaagtggatcgacaggagattatacaaaaaaatctttaaacaattacactaagtcaattatacatggtgacattgtaaaatcatggctcaagtttgctaaagaccgtaaaactattatctattgccattctaccagctttagtaaggaagtagcacagtcttttagggatgcaggtataaatgcagttcatgcagatgctaaaactcctgaaagtaaacgtgacaagataatggttgatttcaaagaaggcaagatcaaaatattatgcaatgttgatctagtaagtgaaggctttaatgttcctgactgttcatgtgtagttctattaagaccaacacaaagcctagtaatttacttacagcaatcaatgagagccatgaggtatcaacctaacaaacacgcaatcattattgatcaagttggtaactttgaaaggtttggtttgcctgatactgattacaagtggactttggaagatcgtgagaaacatccacgcaaagatagcggtagtactgaaggattacagattaaaacatgtcctgattgttttgcagttattaaagcagaatgtgtgaaatgccctatctgcggtcatgatttttcaattgaaattagaaaaattaaacaaaagaaagatcaagaattaagagctattaaagcagaaaaattccatattgatctaatagcaaagaaaaaggttagtgaactaaccagttttaaagaattaaccatgtatgcaaaggcaaaacattataagaatggttgggcttggcacatggctaaaaggaaaggatttatttaattatgggttttattaatttaaacgaaaagacaaacaacagaagtgaactatttccaaagggaacttatgaaatgcaaattgtaagcgtccatggtgatgcaagccctagcggtcatgaaaatatgcaatttgattttctagttcgtaaagacttagacaaagtttctgcattagctaatactaatgcaaaaacacatggtcgccacttctttgcaaatgtttggactgctaaggataaagaaaccggtcaagattcaggctcatatgatccagcagatttggcaaatattgcagatgcaattggtttaactcaagctcaaattgataaatacatcaagtcaaaagaagatttgatgaaagcatgtgaaggaaaattcattagaatctacatttcagtaggtgagaatacttacaaaggtgaaactcgcaaacaaaatagtaccttcactaattcatggcaaaagactaagttcccaccacaagctgctaaaaagcaagaaactgtagaagatccatttaaaggtaatacaggttcaacagatgaattatccgaaaatgatattccattctaaggagtgaagtaaatgggaaaatttacctatgaaaacatccctcaagaattgcgaagtttaaagcaatggggattgtttcaacttaaatgggtaaaggagcggaataaaaataccaagattcctattgatccttataacggtagagctggtaaatctaatgatcctagtacatggtcagattttaatacagcactaaaagcattagatgaaattgaacgtgctgatggcttggcattctattttactaacggatatgtagggcttgatattgatcatatttcagatgatttagcagattggcatcaaggtgatagttctgttagcaatctgataaacaaattccgtttaatgactgatgaaacttatatggaagtcagccaatctggtacaggtattcactgtatttttaagggagagattccaggcaatcgcagacgtaaaggcaattatgagatgtaccaacaagggcgtttctttgcactaactgggaacagtattggtattcctaagattgtcactctttcaaaagaaaagatgcaagctctttataatttcttatttggtgctgataaatcagtgccggataagattgaagaacctgaaattacagcgctagatttatctattcctgacatcatccaacgtgcagaaaaatctaagactggtactcgctttaccatgttcatgaagggcggctgggaacaattctataattctcactctgaagcagatatggcatttgctaatgaccttgcattttggactggtagagacttccacaaaatggatacgatttttcgtaattccagtttaatgagagataaatatgatgaaaaacgtggtgctactacttatggaatatcccttttaaataaagcaatcagtgaagccgttaatatttataatcctgagcaagatgggaaagagccagatctagtctttaactggaacaaacctaaaaaacgggctgttgctcgttcatgggatgatacaggaagaggacttagattaaatgatcagttcggtgatgtattcagatatatggcagctgataaaacttggtatttctataatggctcatattgggaattagataatggacggcatattgagttagcagctgaaaaagttgttaatttgattaaaactgaaaatcctgatttcagctttgctactcagcaggataaagataaagcaatgaaagaatggaataagttcattaaagaatcacgttcccatatggcaaaaatacacatgattgaggagtttaagaagtacgtaactattgatcacggtgtatttgatcatgacaacatgcttctaaacactgaatctggttatgttgatttaactaacggtgaattgaaagatcatgatattaaaaagatgtttagtgaacaaaccgcatcagaatattcagacaatattgattgtcctatgtggaaagacttcctagaacaaattttcaatcatgatgagaaattgattcattatatccaaaaagctgttggctactcaattacaggatcgactgctgaacaagtatttttcttgctacttggtactggtagaaacggtaaatctgtatttatcaatactatcagaaatattcttggtagttatgcaaagcagatgtcagttgagtcaatcatcgtccacaattcaagcggaagtgctaatagtgatattgcacgacttgaaaatacacgtttagttaccagttctgaagctaatgaaggttcacgtttagatgaatcgttagttaagcaattaactggtggagatagaatcctagctagatttttatatggtcaagaatttgaatatgatcctaaattcaagatttggatggctactaaccacttgccattcattagaggaactgatgaaggtatttggagaagaattaaggttgttccattcaatgtacaaattccagctaacaaagttgataagaatttggaaaacaagttaaaagctgaatggactggaatcttaaattggatcgttcaaggcgcaatcatgtggcaagtagaaggcttgaaagaccctgaagttgttcaagatgcatccaagcaataccgtgaaaacatggatccacttgaagcatttcttgatgaatgctgtaaagctggtagcaattacactatcatgggtagacctttatacaatgcatatcgtgattgggctagagaatctaatgaacatttgatgtctatgactaaatttggtagagaaatggctaagaaattgcctaaaaccaaagaaagaaatggaactcgctatgtaggcatccaattaaagaaagaaccacttcattttgattggaattaatggctgtgattagttgcggttagttgtggttggttgtggtgagtatatgtggtagctcaaaccgtttgggctgtaggggtgtgacgtgtttcggttagtgtggttagtttaaaagcctatattattatatttattttcttttttataatttactttttaaagaaaaaagtagtaacactaaccacaacactacaggctgtaggcgtaagacccaccacaaactcaccacaaactggtcacatttttagccaacccaccacgattagcagtctactatattgagtgctaagaaaaataggtgacaaattggcaaaagatgtcatatcggtatttaccaattagcaatgctatacaaaaactcaccgctgatattttttgtgacggtatcagttaattcactacacttcatcagtgtggaagtcacttgagaggaaagaatatttaaatttgtgtaaatattgtgaaatcaacccaaagacaaagctaggacgcgactactacagagatgactatgttgatccagatgagattaataaggtgaatggtgaagacggaataatgtttacttacatcgattgtaaaaatcatccagctttaattatttctcatcctgatcctgagtgctattctcaggaaactgacaaaatctttataggtaattgtccctggtgtggacgcaatttaaagaaagaacatcaaaatgaacaatcataatttagctgaataccattgtgaacattgcggcagagaatttattattgctgaaattgatgatattaaacattgcccttattgcggagatatggacattgctagatatagtttgctaacgataactattgattaaaggagcatgaaaatgaaagatgaaaacggacgtgatattaaattgggtcttgaagaagctagacacataatggctacagattactgtgtaagatcagatcttgctctatgtggtgagttctttaatgaatatggtatgttgcctcaggagtacataaaggagtatggcaatgaaagtaattgataaaagaacgaagaaaactaatgaggattacaagtatggcgatattttaatgtgttgggataatgatccagatgaatataatctgtttagaatctcgactttttatgatagttattatgaacaagatcgttgtattgttgtaactatacacagtagtagtgacaatgaagcaaaaacttgggaaggattatttgactcacctaaagaagcggctagggacttaaagaatagttataaccacgctgaaaaagtgaatgcatacattgtgattactgattaacggaggaataattatgtgcgattactgtaataatgaaaaatcaattatttcaattgaagatacatacgaagatgggtacacaggtattgatagatatgaaaatggagatgtttatattaatggaaatgaattaaatttatcttgtgatgtcgaagttacttatgtatcaaagagtagcaagattaactattgtcctatgtgtgggagaaagctagaaagtgaaaattaaaaatgaatgcagtttcaaaaaaaagcatctgtccatattgtcattttgaaagtggatcagaggatccgatgaaaactttttatacagatggctgtgaattatttatcagaaaagataattcactagaagtggttcttattgattattatgatgacttttcctttaaacttgataaaaaaatcaaattttgttctatgtgtggtaggagattagataaatgattattagtttattttacagagtgaaactattttttaagcaattattttgtcatcacagttatgtatataaaacatcgctgtttagccttagcgactattatatttgtacaaaatgtgaacatgttacatataatcgaccaccgaaggaactaatgaaaagagttgaagacgaatgacatcagtttcaagtagctgctatctttgcagtacattaaatgcttttcacgatggaccggatttatatgcgccaaaaatgaatagatttcacgttaatctaaatgaaatggatggcaagtggtacttaacgattaaaggcttgccttatcctattaagtattgtccaaattgtgggcgaaaattggatgagaatgcaaaatatgaagtaactgattggttataaatgacagcaaaacaatatttcaatttaacattaattttaatgaactggttaatagtcttaatttctttttgttttaaaaatgaaaaattagatttccttatgtttatttggaccagtatatcgtttacatatttaatgcttagttaacaggagataataaacatgacaggaaaaacaattaaatttcaagcaacaacaaataatttcaaagttaatggtaataaagtagttttgcaattagatgcagacctgcttactcataagattaacttaaacaagttaaaagacattgcttttgatggcaatggagttcaagtaagtcttgaggctgatcaacaggaacttattcctgaagaaaacaaggataataagccaatgctagttagggatgacaagtaatgaaaactgcactgcttgtattatttgcaattctttaccctacgataagtgtactgaatttgttttcagattataaaaccatgaagtctaacaacgatcttatgaaagaaattcataaaagtaatgatttatttgattctttattggaagaagttcaagcaaataaaaaattaactgaagctgtgcaacataaagctactgcacaagataattttatgtgggaatcaattgtaattcttgcaaaaagaattcataacctggaggacaacaactatgttaaataataaaaaggctatttttcatgacaagaatggacgaaaaatttatccagattcattactttatgatgaagtcgctaatgagtacttttttccttatcgaaaaaatggtgtttggggtgatgactttttaggcgatttctacccacttaaagcatcacagttaatcttacagaaaaaacatgcaagtatggatgacatgaaattactgatgaaattgcctaatgaatcagacgcaattttcaacacggaagggtttatcaatggaaagtgaacatagtatacaaaagaaaattgaattagttgtctcacaacatcattgtcatatattccgtgctaatgtcggtaaaattagaacgcctgatggtagattttttactacaggcttgccgtctggctatcctgacttgcatggctggcgtgattgggatcatcaagctttttacattgaagtgaaaaatgctactggtaaaccgcgtcctgatcaaatagctttccataaaatgttgatgaaattcaatgttattcatggaattgcacgaaatactaatgatgcacttaagattgtggagaatggtttagttggctatggatatgaatagaagaggtgattgtatggaagtaacaattgacgcttatacttacgatcaattaaaagattattgtcaacgaatgaacgaaccaatgtcagtcattgctactaaagcaattaagaagtatatcgatgcgagtgactaatatggaattaactaattatcaacgtgctttagtaataattcataaattagaagatcggtttggatcaatttctaaggtacctgaatctaatcctaaaatgcaagaaatccatagacttttgccgatgggacgtcaatctgaagacaaaaactatgctcgtactgaagagcttaattatcttggctattcaaacgcacatattgcacaagttactcatcacggtcaagctacgattaattcttatttcgaaaagcatagtattaaaccaaaacagattttttactataaagttgtagcacctgatcattcaactacttattatgctgacactttaatacatttatataaaattatttttaaaaagaaaattgctaataataattatgcgaaaatacattttcttaaacagggatatgctgttcgaactggcaaaatcatttggatgaatgttatggataactcatattattgcgtgaagaattcatcaaatctgtatattaaaaatgggcttgattcttatatgaactctaaagcataaatgcttggtatagcttataatagatgtattagtaattgttattcttacctattatatggagttgattgttgtgaatatttggtctgatgtagattttgataagactgctaaccgtgttgataagttattaaaatataaacttcctagattagctaggcgatgtggacgtagtttaactgatttgtctagtcctcaattgtctagcgcttcaagtcatagtaatcgcactgatggacaagagagaatgatggttaattcttttagcattgagaaggttgttgacgcaatatgccaaacgattattaactgctcagataatagtaagctaatattaataggtaactatattaagtacatccctcaagagcaattaattatgcagctaccctatgaaaagacctactattataaagtacttaaaccaatcgcacttaatgagtttgcagatctttatgatcattggcaagatgaatgtgatgttgaacctgcagatcatattgatctgcatgtatatgtgaaagctgatgcaatttagcttatttattttttaccttgccagtgaacttttagtggacaatcactggacaaacagtgaacttcatgcggattgaaacatggcacaatatgtattgtcggatagtaaagaaaaaggtccgatgtcataacacaacaatcttagttttcttcatgttgttgtctgcattcaattgacaactaaatagacatttaagtacaacatgattaataaacacttggaagaatattttccaggtgtttttcttttgcaagcatagtgcaatggctagcacaatagtctccaaaactattaatctaggttcaagccctagtgcttgtgtttatcaaatgaaaggagccagtcaatgccacgagttcgcagatgtcgttttccaaactgtcatgagtttgcgatgatgccaaatcattattgcaagaaacacattgaacacgaaaaagaattgcaagaacgcaatgagttttatcgcttgcatcataaacgcagcaagcagtcgcaatggcgatacaatcacatcactcgctatcgtaatccggtcaagacagagcaaaacaaattctatcattcgaagcaatggcgtgagatgcgagcaatagtttttaaacgtgattaccatctatgccagtactgcaaggctagaggtcaattaaatgaaggtaacattgtagatcacgtactaccagttgaaaggtatccagaagaaatgaagaatcttcagaacatggtcaccagctgtggaagatgccactactggaaaacacgttttgaagagcaatattatggcacaggacttcatggtaaaccaacagataatccgccaataacggacgtaaaattgattgctaacttggcggctagattgaaaaatgatcacgctgtaaatggctaaaaattcgcttctaagagatttaaattttgtaagtgtaattatacatgaatcaaaaataaaaagacccccgccccgtttttttaacgtctagggagccgcatcagtgccgttttcttgtgtcacaaacaaaattttaaaagtttttgaaagggggctgaaacatgaacaaagttgatctatcaaagccgaaagtacctaatcaagcacctaaatggcttggaacttacggcaaatatttgtatccaaaacttgccacttatctcaataagaatgacaaaatcttacgtgctgatgaatatttacttcaacaatactgttcagcctacgacacctaccgcatggcttatgaagaagtccttgaacatggtgttcagcaaccaatctataaaacggtcgtctctcctgtggatggcaaggaagttgctaagaattttttaggatacaagaaaaatccagcttatcagatcatgtctgattcgttgaaacagatgaataccattggtaaagaattaggattaagtcctaaagcaagaagtcaaatgatggatttaaatttacctactacagatgataaaaaaacagctgttcaaagcttgaaagatttttttaagtgattaatttattttaggttttgttgattatacacaaataattgtgtataatatacttagaaattgaaaggaggtgaaagatatgccttggaagccagctaaaatggttcgttttttaaagaagaatggttttattgaattacctaaaaaaggtggtcatagaagattttttaatccaactactggaagaaaaacagaagttccaatgcacagcaaagaacttaaaaaaatgactgaaaaagccattcttgaacaggctggattagaaaagccaggaggttaagcctcctagctttggcatatcataaaatatgaagcaaaatatcgtagcttatcctgcaattcttagtgaatataatgatgaatcaggtcattattatgttgtaacttcacctaatattcaaggtatggtaactgatggtgaaactattccagaagcattagtacatgctgaagatgcaatggctgcaatgttagatggtgaagaaaaatatcctaaagttcaaaatcctaaagaatggaaattaaaagataaccaacaagtaacatgggttacggtcaacatgacaaagtggctcaatcaatatggtaaaactgtaagaagaaatatttctattccagaagctttaaatgattgggcgaaagaaaataaaattaacgtatctaaagttgccacggatgcattaagagaaatgcaaggataatttttagggcttaatcacgtttttttgtgattaagcctattattttgcctaaaaatagtaaaaaagaggtgattgatgcaatgaaaattgatttaacacaaactcatgacgttgatggtgcttatcaggcaattaactataacggcattagaattaaatacaatgatgatgccacaaaatattgttttgatgtattagatggtaaaagattagctggttatattactaagcttgcttgtttcagaaacttacaagacttgaaacgtcaaaatacatctgattttccttaccattatgatgttaaagaagtacaaaatacttttaagtttgcatcaatcattccagacgttgatttacataaaccacttccattaatggattggcaaaaatttattctagctatgattaatggctggaaagatgcaaacggtgaaagaagatacactgacatccacataagtgttggacgtggacaaggcaaaacacaaatagctggtatccaaatgtgcaaggctgtcttgattgatacgcttaacttcactaacaaggacttcttgattactgctaatacatctgatcaatcaacaaagttgtttggttatgttaagaaaatgcttgaagcagtcattaagattgaaccgtttgcatccatagctaaagagtcagggcttgatttacagactaaccaaatcattgaaaaagaaactaacaataaggtatggaaaatcagttatgaagctgataaatacgattcaacccacaatgttttagctatctatgatgaaaccggtgctcttgatacatatgatagaatgactgatattacagatggtcaagcacaagtaattccatatcatcaattcatcaaaattagttctgcttatcctgatccaacaagtccgtttcatcaagaacaaattacgatgcagcacatcatggaaaaagattatagccgtgaaggtgataactctctctgtctcgtgtgggcgcaagatgaccttgatgaaactttcaagcctgaaacatgggaaaaatctaatccattaattggtttatcagatgaagaacgcaagcgtagaactgacaatttaattaagcaacgtgatcaaggaatgcttactaatacgcttcataagttccagaataagaacttgaatttgtggcttaaacaatcaactgctagctatttgaatttgaaagacgttgaaaaagctatcaatgatgatttcaagatcgatggcttaatttgttatatgggttttgactactcaatgttttctgataatacagctgttggttttgcttttccgtataccactcctgaagggatgcataagtggcaaatgatgcaacattcatttattccatggcaacaagcaggaagtattgaagctaaggaaaaacaagatggcttgccttatcgtgaattagctaaaaaaggttactgcacaattactagtcatgaaaaaggcattatcaatcccgaacaagtttataaatggattcttgaatttactgaaaagcatagactagatgttaagttttttggctatgaccggtatggtagttatcaagttaaaaatattactgaaagccttaatgcaaatacaggttggttgattcaagatattgcacaacgaacttcagaacttgctaatccaactaaattcttgcaagaagcttacgctactggaaaaattacacgatttgatgatccaatcgaagaaacggctctcttaaatgctgttattagggaagacaagattggtattcaagttgataaggacaaggctactaagaagattgatgttgtggatgctgaaattgatgcaatgtatcaaggaatgtacaactttgaagattatggattgatcaatgacaaatcacatcaagtagaacggatgacacaagaacaagtgcttaaatggtttgaaaatcctgattctggtcttttgggaggtgaaacgggtgataattaaaacgctgtttgaaaaaatttggaaattcttagatgtaatcctttatttattgggctttggctttattgtcatagctctttttttatggaataaaatagcaggttttgcaggtctaggaattgctttacttttaacaggcttattaattgatctactcccacatggtcagggaggaggtgatagataatgcctgtttttaatttaaataaaagcaatgtatcaggctacagcttaaatgatcctgaatttattactttatttaagaatgatttatctgttagtgagtatgtttccgcagatactgctttaaaaaattcagatattttctcattgatctcacaattatcagctgatttagcactggtaaaaatgaaagctgataaagatagagcacaatcactgattgataatccttctaatttaactaatggctttagtttttggcaagggatgtttgcacaactgctattagatggcaatgcttatgcctacagatggagaaatatcaatggcgttgatttatattgggagtttttaagaccgtctcaagttcaagtgatgctcttagaggacggatcaggattaacctacaacattaattttgatgaacctgatattcaaacaaaggagaacgtaccacaaagcgatgtgatccacatcagacttgtatcaaagaatggtggtaagactggtgtttcaccacttactggtttagctaatgaactaaatatcaaagatgcaagcaatcgtttaacactccatgctctttctcaatctgtggaagcaccaggaattttaagtgttactggtggcggtctgcttgattggaaaaagaagtcagctagatcacgtgaatttatgcgtcaagttaataactctgataatggtccgatcgttttagatgatttagagacctatcaatcgttggaagtgaaaagcgatgtagcaaaactactgcaacaagcagattggactggtaagcaaattgccaaagtctatggtgttcctgattcttatattaatggtcaaggtgaccaacaaagtaacatcactcaaattggtggtcaatatgctaaggctattaatcgttatgctggtgcagttcaaagtgaactatccaataaattgaacagccaaattacctatgatgtgagaccagctattgatgcaactggtgataactttgcatctgaaattggtgatttatcaagtaaaggaattttgtcaggcaatcaagggcgctatgtattacagcactatggttatttgcctaatgatttacctattcctgataagtcaattattccagcaaatgaaggaggtgaagatgatgacgacagtaccaatcaagggaataatcgtacccaataatttaggtgatatttattcatttttagggtatgaagtggctagtcctaatcaattaaatgaagcgttgagtaatgctaatggtcaagacgttatattggaaatcaactcacctggtggttacattgatgctggttctgaaatgtatacagctttaaagaaatatccaggcaatgtaactgctcaagtagttggtcaagcttgctctgctgcttcatggattgcattagcggctgataaagttgaaatgtcaccaaccgctcaaatgatgattcatagagtaagcgttggtgttgaaggtaatgtagatgatcttactagtgcattacaatcattagattcaatggatcaaacctatgttgatctttacagcaagcgaactggtttagataaacaagaaatttaccgtatgatgtgtgcaactacttggatgaatgctaaacaagcggtagataaaggttttgctgattctattatgtttgaaaatgatcaagcaccagcggttgttaatgcttatggagtgcctgttttaagtagcggtgcaattaataagattaaaacattaattcatgaaaagtccgatgatgactctaaacccattgagaataaacaagatacagataagggacaagtcaaaaaagacttgtcccttttgttatggcaatagaaagaagagaacgtatgaatttacaagaattacaaaatgcttggattgaagcaggtaataaggttactgatctctttaataagaaggtagctttacaaaagaattatgaagctgatcctgaatctgtttctgctgaagatatgaagaagacggctgaaaattataacaaagctgttcaagctcgtgattttgctaagcaaaactatgacgatgctgtagaagctcaaaaggttaacaagcctgctaataagcctgttgaaaataagactgaagaaaagtcgaagaacattgcttcaggtttcaaggatatgcttagaaacccaatgaagtacatggaaaacttatcatcaagttcaactgctgatggcaatgctggtttgactattcctgatgatcaacaaactcaaattaacactttgatgcgtcaatatgatgacttgcgtgatttagtaactattgaaaatgttggtactgatcacggtactagaaacattgaaccattctctgaaattattccaatggatcaattggatgatattcctgatgattcaactaataattcagactataagtggcaagataaggacattaaggaaggcaattacccatcagttaagcaacttagctataacattcatgattatggtgatgtattctttgctccaaatgatttaatcaatgactcaaacgcaaatattgaagcatggttaaaccaacacattgcacgtaagaatgttgttacctataactcaaagattgttggtttacttcctaactcacaaaagaaggctactatcactaagcttgatgacattattgatgcattaggtgaattggatatggctttatggggtggcgctaccttgttaactaacaagtctggtttcttgaccttagctaaggttcgtatgtcagacggttcacgtgccatgaacgttgatccacgtactcaacaaaccaccttcaacatggatggtatgcaatacattaacgttcgtgtggttgaagacagatacctttctaacaacactactgttggtggcaagtatcaaagccatccattttactttggtaactttaaggaatttattcacatgtacgaccgtcaacaaatgtcattgcttacttctaacattgctgataaggcatttagacgtaaccaaactgcgatccgtgcattgaacagatttgataccaagatttgggatgatgaggcgatgatttcaggttcatttgataaggttgaaagccaaccaatgcttatgcaagcagttactgcaccaacaagcactgattcaggtaagtagtagaaagtaggtgatcaataatgaccacttatttaaaaattgatgatgggcttaagcgctcacttggttacttgcctgatgatgatgcattggattcttcagatgaagaacgtatggaagcaacactgaaaggtgctgaaaattacgttcagggtgcaattggtgaagatgctgatgatagtttttacaaagatgattcagtgtttgagctgtataagctagctgttaatgcaattgcaactaactggtttttgcatccctctgctgctgtgtcatcaactacagcaaaacaaatcataggtcaactccgtgggacttatgatgaatcaaaggtggtgaatgacgatggtgcaacttcagagctgggacagactaattcataaaattgtgtttggtactgttgatgatactgaagatgataacggtcttccaacaaatgagtttaaacgactcgcaaaacctacactatgtggacattggggattaactactggtcaaatagttcaaaataaagggcatcatcgtgatgattcatttattgtagttattcatcacaaacgtgattatgatggtatcactcatgcaatgcttaacaataagctttatgaagtgagtgatattaatcctgatccatttcaaaatccaactgcaggagatttgatcactctcacacgagtgactgatcgtgatggttgatttagataaaggcttaaatgattggctagataaaattactaagaaagttaatctatctaccaatcaaaaagcagaaatcactggtgaaggtgctaagacttacgctgaagttcttaaaaagaatactccaaagtctcatgcaagctatgcacatgcaaggtcagctggtcatggtcgtaagtctaagcacatgagagatgccattacttataaggctggttatgaaatcaatgatggtcaaactggtgatacatctgtaggttgggaagataaatataatgcattagtcgcacggtttgttaatgatggaacacgtgatatgtctcaaaaagaaatatcaaatctacattttaaagaccatgcagaaaaagaagctgcagatgcagtactaaaagctaatgctgaaaaatttagggagatattagataaatgactactgttgcaaagcaggtagttgatcttcttaattcttccaattttcccaaattgcataaagcctactcttttgcggttggaactagcgaacgtacaccacgtgaatctgtggatgtactcgttagtgaagtggattttgattttgatgaatcaggcagtaaccaatacacggaacagatacaacgtttagcgataaacgttttttatagtaaaaaaacaacagtagacatgaacgattttgaacactcgctcatgtctttttttgtagctaatggttggcaaattgtagctagttttgcaggtcacacatacgaccccaattctggtgaaccaacaattagctttcagataaaaaggagaattacatggaacttcaaggtttaaatgatttacttgttttcaagttcgataaggacggtaagcttgttaccgatgaatcaaagggcggtttgaccaccaacattggtaaagatggtgtatttaaaattgatttggaatccagtaaaggtgctactcaagctaacatcactggtctttcaagaactgcacaagctgtttacggttctaacgcaaaggctgaacaacactttggtgcatatcaaattactggtactttcggtgctaacgacattccacataacttctatgatgcaatcgtaggtcttgaaaaggatagcaagttaggctttggtaacatggctaaagatagtactccacttgcatatggtggtgttattgctcactcatacaactcaaacgttggcgttgatctttactttgcattgccatacggtaacttgactcctggtggtgacttaactatgggtactgatactgaaaacccaactttggtacacgatacattcactcttaatgccgctgcacgtccatcagatggtttagtttacgaaaaattctattcagatgaagatggatttaactttgacaagatgcttgattggattatttcaggtactgttgctggttcaggtactgaagatccaactcacaagagtgctgaccaaggtggtactggtgatctaaagaaagatcaaactacttcaacaggcactcactaataattaattagtagggtgggtagcggtggcaaattaatataaataattttgttaagaacggtgtgaaagccgttctttttctttttttgaaaggaaaatcaatcaatgttagtaaaaatcaatggtaaaaagcttcatttaactacttttgaagttgaaacaactgtaaaaaacgtacgtgcatgtttaaaggcacaaaaggtttttgcaaaattatcaattgcaattaataaggttaaagacgatgatgaccaatcaattcttgatgttttaacagcacaagaaaatcttttggatgaagaagaaaagtttttgaagaagattttgcatttatcagatgcacaagtagataagattgaagattctgctccagaagatgtaagtgaatttgttactgatttaattggaaaaatcttacaagtagacgactccaaaagcgacaacgattaatgatcctgatccagtacatgcctatgaggaaatgctggaagattttgattatcaagaacaacaaatgattgttaatgctcatatgtccctagaagattatgaaaacactgattattaccgtcttgtggaagtaatgagtgcaagaccaaaggacaaacgtccaatgagtctttgggactttgcagcaagtttagacaaaacagaaaggaggtaaataaatggcaggaagaataccagttggtacactgattacagatattaaattaaacggtgatcagcctgtaaaaacgttacgagaattaaggcaagctgtatctagtactaccagtgcatggaaagctcaagaagctgttttaagaagtgctggtaagactactgaagcggctgaagctaagtacaaaggcttatctgatgctgtaaaaagtcagcgtagattaattgatggcttagttgaaaagcaaaaatctttaaagaaacagcaagaagaaattgatacttctacagataagggcaaaaaagcttatgaaagtatcagtactgcacttcaaaagaatgctactcaaactttgaaagctactagtagattagaatcactgactaagcaacaggataaggctaaaaactctctcacttactacaagtcaggattagcagaagctcaaaagactttaaaaaccactacggctgtttcaaaatcgtatgttgatcgtttggaatctgaaggcaatcattataaagctaatgaagctagaatttcaggttatagaagttcgatcagtaatttaactaagcagtatgaaattcaatcacgtgaattaaaacgtattgcatctgaatctggtgcaactagtgaagcttacaagcgtcaacagatcagagtgaatgaaacagcgacttcattaaataaagcgaaatctgctattagtggtcttgaagcagaacaaaagaaaatcaatcctacaccatgggatagattaaaagctaagatttctagtgttaataaagaaagtcaagaaactcatagaaccttgaaagaggtcttcatgggatctgcacttggtaacgctgtttcaaatgctgtttctaacttaggatcaagccttaagtctgcttacacagagggtatgaacttgaatttagcaattgctaagatcaacggtaggttcaaaggcatgggtatgaataccagacaaattcaagcccttgataagcagatcggtgagttaaagtccaatactgacttagctggtgattcagcatcaaacttgcaagctcatatgcttaactggtcaaccattggctttaaaggtgctatgcaaatggctaaaaccattgctggtgtaggtgatagttctaagatgactggtcagcaaattgaccaaatgtctgcaggactgcaaagaattggtagtactggtaaagttacttattcctccttgagccgtattaccaaagctgctccaacattcatggctacacttgcacatggtgctggtatgtcagaatctaaacttagagcacttttaaaaactggcaatgtaacacaaaagcaattccaaacttggattgctaaatcatctaagtatgctgatgaaagctttaaaggttatggtcaaagtcaagctggtgctttaaaagctatgactgttgctagacaaaaactagaacaggaatttactaagccaatctttgatgctaagactagtggcttgcaagccttgaagaatatcatgactagtaaagaagttatgagcggtgctgaccagctgggtaaagcagtatcaaacgttattggctacttagataagcataaaggtgatattgtagctatcactaaaaatgttatctctctaggcgtggaagttggtaaggcagtttggaaagactttgcagctattattcaaaacattggtaaagcacttggtattgttaaaggcaatggcaaggattctggtagtgcattacatacacttgctactgctacaggtgatttagctaaaaataagactgctgttaaggctatatctgatgccataattgcaatggtagcaattaaaggcatccgtaaagtcagtgatggtcttttttctattggtaaaggtgctgttactacttataaatcagttaaagcattacacgatggtttcaaaggaattgaattagctaaagatgctactaaaggtgaaaaagcttgggctaagtttggtggcgttctatccaagacttttagcggctttagaaaagttggaagtaaaacttggactactgtagaaaaagctggcatcaaagcttggacaggtattgaaaaaggctgggctaaagcaagtgatttaggtacaaaagctggaaaagcaatagctaagggttttagagctacaggaaatgtcttagcaaaggcaggcaaatggagctggagcaaaattaagtctggctttaattttgcaaaaaagtttggtcaagaaataggcaaaaagatttcagcaggaattaaagctactactaagttctctatgggtaagcgtcttgctactggtgctttagcaggtactgcagttgctacacctgaagtgatcaacgctgttaaagatcgtcacaatgctaatgctagaagtcaagacattggcggtgctgttggcgctgtcgctggtggtacattaaccagcatgattccagtagttggtccaatgctcgctcccattggtgctttacttggcaaatatgctggacgttggggtggtcaagctgtcaataatttcaccaaaggctggcaaaagaacaaaccgccaaaaaaattctggtcacttgaaaatctcggctattctgcacataacatgtggaatggatttactaagggtgtaatcaataccattaagtggtttaagaaaaactggaaagaagtcggtttttactttgtaagtccgcttgctggtgctattaattcactttacaaacacaattctaagtttaggaaatgggtgaacagcttagttaaatcatttaaaaatgcttggaaaggcattgggaaatggtttggtaatgttggtaaagctgtgcaaaaagcatggcgtggaatgactcattggtttagtaacttaggcaagaacatggctaagggacttaagtcagcttggaaaggcatgtctcactggtttagcggcattgctcgtggcgtacgcaatgcatggcattcaatgacagcttggtttactagacttggttctgcaatgtctaggggactcaaagcaacttggagaactgttactagatggtttggcggtattgctaaaggcgttcaacatgcatggtcaggaatgtctcatttctttggccatgtaggctctgcatcagtaagactgtttaagtcagcatggcatggaattacttcatggtttggtggtattatcagtggcatcaagaaagcatgggatgatttctttggtggtatcagtagtactgttaagttcattggtaaattgctaggtggcaaggttaaagtaggcaatgttcacttagctgaaggtactgattggaagaagaaatacggttatccagccatcttaaatgatggtcatgattcgccagctactaataataaggaaggcattttaaatcctgatggctctgtggaagttcaacagggtgtgaatgtaccacgttggatctttccatggcaagatgttatcaatgctcgtgatatggctaaattgtttggtcgttctgttcaccttgcaaatggtactgttgatttacatagtcttgaaggtaagagccctgctaagattttagttaatcttactaagcttcttaagaagaaatacgatgaagaccgtgtgcgtcatcaaaagcaaaaagaacgtcataacagaaatgatgcttctactgctaatgagcgtaagcgtctgattaagcatgaacaagatgacaaggctgatagagctaaagtcgctaaagaaattagagacgctctaaagcgtggtaaaaatacccaaggcttgattgtacagttaaacaagttaaccagtcgtattagtagagaccgtaaagccgttgctaagactaatccgcaccacggtgaaacactcgtggatgaaggattattacttggtgctaacagtcgaattggcaagtccaagtggatcagtgatgcactctttaagaaacttactactgctcctaaaactaagaagaaaactaaaaagcgcaaaacaaagaaacgtaaatcaactagaagaagatccacaagaacatccacagcaagacgttcatattcatctggttcaagtcgtgtttctgtaccaaacgttagtgtttctagtgcatcacttaaaggcttatcttctaagtcaatttctgtaactgctaaggtaaaaggatctaagcagatcaaagcccttgaaaaggctatgaagcgtattaagggtggcactcataaggttactgtaaaaaccaagggtgttaaatctgttaagtcactctctaaggcaatcaagaagatcaaaggcaaaaagagtactgttagtgtaaaaacaaaaggtactagccaattaaagtcattacacaaaaacattaatactgttgaaaaacgtcttaatgttttagctaggactgctaaaaaagataagtttggcgaacaaatttctaggcaggctgaaaaggctgttaagtcactcgaaggcaaaggtaatttcaccaagaaaatctctagcatgtctaaagcgactgttaaagatttcaagtcaatgacttcaagtgttggtaaaactactgataagatcagaaaatcaactgaacaagactttagtaatctttataaacggtcttaccaatctgttaagagattgcacgatggtgtaatcaaattaggcactgctactgctcgtggttttggcggtgcaatgcataaaatggttggttatgcatctgattcaatgcgtggcacaatcagacaaatcaaccgtggtattcgtggtattgatgctgtattaaagcaatttggtggtaatagttctgttattaatccagtccactttgctaagggtactgatgcaaatggtcgtttaactcatgacactttagcagtcgttaatgatgctcaatctggtccacgtcaagaagctgtagtaactgatcaaaatgacattattattcctcatgggaataatcgtaggatgctattgagaaaaggttggggtgttcttaatggtactcaaactcaatcactctcacttccacactttgcaaatggtactggcattagcaagaaagaacttagaaagttagcagaaaacagcttaaagcactttgctgatagctttaaatcaatgtttaccaataatcttgatgatgttggttctaatttaactaaagattctactgatttgagtaaacgttctggtactcactttggtaatccatggtctcaagccatgtggacggttatcaataaagccattggctctggtggtggttcacgtgctaagttcttgcaatatgccaaggatacttttgaccgtgttaagtatcaaatgggtgctgcgtcaaggaccttatctgactgttcaggtatggtaatgcaggcacttagacattttggaattaacattggtcgtactactgttgctatgcaggaatcatcaggtgttcagtatttaggtaaaaacttatctaaaacagagcctggtgatttggtcatttttggtcatggtactggtgcagctggtcacgttggtattatcaacaatccaagcaaaggcacaatgtttaatgcctccccaccttatgcacgtatcagtagaatttctgatgcaatgtctatgggctatggttactaccgtgttaaaggtcttcacgatcaagctaagcatcaacctaagattaaacctagtttgttagctttagctaaacgtgaacttggtggtaaagctcttaattggattggtgatcacttgtcagaaaatgaagatggtataggtggaaagcctacaggtgatcacttacactggttaaaacaagccggcattcctgaatcttggtggcattatatggaattgattattgatggtggaaatggaatcccaggtgaatctcactggaatcctagaattactaacccatcaagtggcgcttatggtattccacaatcattaccagcaagcaaaatggcatctgctggtagagattggagaactaatgctattactcaattgagatggatgaaagactatatccgtggacgttatggtactgctaaagctgcatgggaacacaaggttaatacttctactcactggtatgctaatgggggtattgcaagttcgccaagtatttttggtgaagcaggacctgaaatggctgttccgcttattccaagtaagtcaactcgtgcttgggagttaattggcaaggctgtaggtattcttacagctaacagtaatttaaatgctaaccaacaacgtatttctaataaagatgaaaaagatgagcatgacttattaaaagccatgcttttagttttgcaaaaaatgagcgctcaaaaccgtgatattcatatcacacttgaaactcctgaaggtcgcaagctgtgggagttagttgagccgttctacaagcaagaccgtagacaagacatgattaaagaaagaaggggattaagtgcaagatttagatgataatgtgaagctgatttttcaagaccatgcttcaacagattttggcatggtcgtacaaaagccatgggatttaattcatccaacagctgacattgatcctacacatataaaaggtagaaatggtgatttcttacaaaataatcaatcttaccaaaatgtgactgaaacctttaatcttgaaattcttagaccacctgaacgtggttggtttgattgggaacggtctgtaactgattggctctctgctccaactgatcctgatgggcggatgaaatatcaatatcttaaattcactgctgatccaacatatgtgtttaaggctattgttaaagatccattcactgttactaaagatgtaactagtgattttgttggtgtatgtgcaataccgttttattgtcagcctttccaatatcgtattgatggaattgcttatatcccattgcctgatagcggtgtggtagttggtgaagaaaaatggtctgctattcctgattggcacttcattgcaaatggtagtttcactttgtacgtcaatggcttgccttacacgtttgagaatatggaaggtgaattttggcttaatggtgctactggtgatacttatgatgcagatggcaatctatacaatacacaaactcattttcctaaccttgatactcctaaattgtggaagggtcagaatactatcactgttactgctgaaactggcactactatcactaaagctgaatacaaaccaaattggaggaggttgatctaatgaaattaactgtaggtacaattcctgaagttgattatggtgactactctgatttgatgacaatgccacatctttatgacagtattgccagtgattttactagtagcggtattcctcttcctgatgcaattgattgtcaggttaatggcaattctaatcagttttggtctttaactatgacttatccaagatcaggattgcaccaaaaggaaatccaacctaacaaatggattatggaagactgtgatcctaagcacgtacatcaatggtttaaaatcatccacattactcccgaattagataatgtggtggttgaagcggaacacattagtgcgttacttgctaactctactgttgctgatgatattcaattaaacggcgcaactgcacaagatttaggcaatcaaatccttaatcaaatgcaggagcagagagaatttactttctattccgatgttaacaaagtaagtaaagtgaatattcaaggcggccagcaggcaagtaatttgtttattgatcctgatcaggaaggtgatactgttactcaatcagttttaggactgtttggcggtgaatttgattttgataattggaatatcagacattcaaaacgtattggacgtgattctggtattaaagttacctatggtaaaaatatcaaaaccacctttagtcaagataagaacattcagaacatgtatactggtgcggtatttgtcgctaagtatgtaccaggtcaagcaattgcgaaaaataattggcaaggctgggctacatgggaaagcacttacgattcagtaggtatcacttacatggctggcggcaatatcaatatctatgattgtcctgtagatggtcaaaagatcattggtactttgcaaaacgggatgaaactgcacttaggtcagattgttaatgatggttcatttactcctgatggtaaatatcaaattaacactgttaatagcgatagctggtatccaattgcacaaagtgatggcggtggctggattgattctaagtggatcaattttgacacatcaggtgcttatgcaattaacaatgtcagtgggacggtaactgttaagagcagtaatccgtttgatagtgaaggtgtaggttctcgtgttactgttcatggctctgctgtagttgcttacggcaaaggaaaatcaattagagtattttattcacctgaaattggtcctgatcaccatcctgttaagtcactaggtcaagactggactgttaaaaatggtactgttgttgactatgacatggttgaacgtaattcaaacggtgatttatggtacagaataggaccacaccaatggctgtatggaccacacttatcacttactgaagaagacagctaccgtcaatacagcaactctggttatggttatgttaaagatggcgctgtaaagtatcactttactaaggaccataaaatggtgtctagcaatactactgttattaaaaaaggtagtggcaaacatgcatggcactgggctggtaaaggcaagaaacgccataaagtttacggacatgctaattactgggccgaaaagcaaaagaaagtcaaagttactgctaaaaaagggatgtctactattgataaaacaattactcaaggcggtaagacctacatgcacacgagtcatggctgggtagaatctagttcaattaactacactaaagatggttcagttaaaccacattcctttgatgactttattaataatcaacttaaagatcattccaaggttgaaatttatgcaactcctgacagtaagaatgctttaaactggtcaattcctaatggtgagacattcactgttgttaatggtcatgaagcaaaatctggtgatggcaagacttacattgaagtaacttacaaaggaaaaaatggatggctctgtgaagatgatattgatgacaaaaattcaaatattacatctgcagatgctgatacagataattccgctgatactgacaccaactacaacgcaaatgttgatcaatctaataaggaagtaactgttaagattggtccactttatgctgaaggatttggtgtaaatcctaacattgatagcgttaatactgttgatattagtggttacttcaaacatgatgatcaggatttaagcggtcagcaaagtgatggtagttttgttgctacacaagctgatattgatcaagctactgaaattggtaagaactatctaattgaacacagatatggtcatatgcaagttcaaacatcacttgattatcaagacatgtcagataatgatcaggactttactcaactaagtctttatgactatgtggatgttagttttcctgattatgaaattactgaaaaagctgaagttacagctacaacgtgggactgtttagcccacgtttttttaaatgtaactttaggtgatttgccaactagctatgaacacctacttgttcaagctagtgaagatagaactaatgaaaaaatcacttccacacgtcaagccattgccagatcaaatagttttattggtgctgttcaggaagctatgactttgcaaggtacatcccaaactcaagcatgggagaccttaatggcaaagttaggtaatgctcactataaaactgataaagctggcaagaagaccttagtacttgatgaatcagttaaagattttgctaaccacatgcaggaaatggttactaacatagataactttgataattttctgaagtctggtggtggcggaatgcttgaacctatttccagtgatggctctaccagttggaataacgtcatggcaattagagctaaaaacaatgatggttcttatatggaatttaatggcttaggttttaatttccatgatatttatggcaatccacatgctttgtttggtattgatgattcaagtggtgaagtaactggcaatttctttgttgatcaagctcatatccctattttggatgcatcacacattaagactgatacaattacaagtttgggaactattaacggtgttttacacgttgaaaaccatggcatttcaattgcggttggagatgccactaatttactaaatcctagtcaggaaattggtggtttgagtttagattctccaaattatactttgaatttgggatctggatcagtaaatattcatgataaaaatagtggtgctattacacacattggacctaatcaagcacagattggtggtaggaatgttgttgtaacaagcagtgatcaacctgtattaggttcatggattaagcaatattggcgaggaccaagtaagtattgggatttataaaaatgaatacattagaacaatttgtagcaaatgaattgggaactgttattgcaaaccaatccattaaaatagcgaaactagaaaaagaaaatcaaagtttaaggttaagaaatactcaacttcaagaaattcacagaaagaaggtgaaagagagtgagtctaagaccgataacattaaaaacggataaatcaataacccccgtgtcagacgacacgagggttttacgttctactgaaaaaggtttagtgctggacgtaacaattttaaatgaagatgattctccctatgatttaactgataaggatgtttcattttcagaaatcaaagagagtgatcgtgtagttgctgatgatggtactggtgagcaaagtggtaaattcaacatgattgatcgaactaaaggacactttagttatcaaatgactcaccaatgttatacagccagtggcacttgtttctttcaaattaagcaaggcgacactattgttgatactacacaagatttctattttcaagttaaagttgatccaactgttaagcctatcaatgatagttatgtaagtagtcttattgctatggaaaaccacctgctaggtgctactcaaaaaacacaagctactattgatcaattgaataaagattcaagtaatgcacaacaacaagcacaagcagtacttactaagattaacagtgattttactgattactctattaaatacaataaattatctagtgattggactgctgaagctaaatcaattcaagacgctgcaaatcagcaattagctaatcttaaaaccagtaatcaagctgacataactgcagctgttaagtcaattactgatcaacgtgatgctgctttaaaacagttaaacgatgataagactaaagcacttgctgatttacaggcagactacaacgcatggaagacttccacagttaaagatttcaatgatactgttcagccacttaaagacagcattagtgaaaatgaccaaaaacttactactgtaagtaagcaagtttctgatactgtagtgtcaatggattccttgaaacaacagtttgacaaggtagacttttccaagtttgttacaggggacaccattaaaaattactacactaaggaagaaactgatttaagactacaacaagctggtaaggtaaaatctgtagataatattcaacctgattcaaacggaaatattaatacagaccactacactaaggatcaagcaaatcaaaaacttgccactaagctgtcgtttgtcaagagtgacagccctcaagcggcttatgaagcaagttttaaaccagcagcagatggttcaccagtcattgcaatttatgacatgaatgatgagcctggcgaagctgttattgctggtcaaaaagttacaatcagtactttaaatgacgctattaaggctcttcaaactcaagtgagtggcttaagtggtttgcaaagcgctgtggacggtaaagccgataaagcaacggtatttttaaagactgatgcagacagcttaaagaatcagcttgaatctgaaattagcaacgctggtaagcttaaaactatcactgtaaacggtggcgcaaagataagccctgatgatagtggcaatgctaatatcactgttgatttatcaagcaaggttaaccaaacggatctgaataacactaacaacagagttacagcaattgaaacaggatatatgaaaaagcctaccgtaattagtaaagctgactacgataagcttgctactaaagatccaaatacgttgtatgaaataacagaataaagaaggtgaccgtatggctttaacgataaatggcaaaaaagttctaggttatgctctaggtgaaaatgagtttcttaatggaaatggagcagaaaacctaaatattttttatattggtggtgataataacagtgaatggaaccatcaatcttttactattgatatgacaaaatattttagtcaagctgatgtaaagtattcggatgttcaatattaccaaattattgtaaaggtattttatcaagatgctgacaataatactcttgaaaacaattttcgcacaccgttattgaaacgcggtgaaataaataacaagcgaagtgataatgaaggcagtcccggagctatgtcagtttggtttacggacaacaccacattagctgtccgtacaaaatccgattatgacgacactttaggctattcatatactaatctggtattggcggtgtatggctttacttctcaagatgtaggtgctggtctatagatggcagcacccaatagatattcatcgaagaattaaagctgtcgttcatgataaacgacagcgtacttaagcgatacattcgcttattttttatatcttagaaaggagtttttatatggctaatatttttgcacctggtggtcaagaattggcattagcaaaagacattgttcgacctaatttgcttgctaattctaaaaaatgtgagataagaacaccagcaggaaatatacagtttggcaaattcattaccctaaaccctaataatttaggatcaatatatttaactgatgcagcttcaaataaaggtattcacaaagacgcaactacttatttgccaatagagcaaaacacatattatgctcaaacactatggtttaccacagatgctcaagttattcttagtaattttgcttcaaattacatcttttactcttcaaatggctctcgatatctcttgtcaggcgtagaagcacatcaaattgttggcaatcaatataaagtatctggttattttaattccaagacaaatagcgactttaatcttggctatattggcaatttttctcaatgtttgaaaatcgcatcaactgctcaggttagatttgatgctttaaaagtagaaaaaggtactgaatcaacagactggtgtcctgcctatgatgattatgtaatgcaatctgatttagatgatcttaaaacacaaattgagcaattaaaatcaaaataattgaagcccacgatggctattttttatgcaaaaagcatagttaattaacactgtcgttgatattgaacgacatacttatttaaagaaaggaaaataaaatggcagaattaaatgaaaatacattttggatctctggaattattaatggagaatacagagagtgtgatggtccatataccaccacaaaggatatgagtgataaaggctatccttatgtaactaaaactccaaatccaaactttacacatcaaaagtatgactacacagctcatgaatgggtagacacttcagatgatgctttacttcacactgtggaagatgtaaaagaggctgttactgaattaaaatcaaacagtcagtcaaatactcaatcaaatgatcaacttgataagaaattagataagcttactactttggtcattatgtcaaatgttcaagtaggtgaaattagaaaagaattacaagcggttaaggctcaaaaccagtctgcagctgctactcaacctactgaaccaacacaaaacaccacaccagaagttgaaggaggtaataagtaatgtttgagatttacaagtttgaatttgataacgattttatcagtcaagatgaattaagaagttacattgatatgggcttaattactcaagctgaataccaagaaatcgttggtggtagcaatgaagaagctaaaccagtggaaggctaaattaacaattagaaattgtgaactgctaattggtctttttattttaggtaaaggtgtttggctgtttcatgatagccattatttcatttatcctccacagtttgagaatattgaaaacagcagatacattgactgcttcctaattttgttaggaatcttgttaatgctatctgcatttttagttccgtatattaacaatattaaatacaaaattatgctaattattgctagtaaagtatttcttgtaatagttggtattgtttgtatggttttagcattattgcaattaacgcatggcatctttactccattctatcgaatggggcattcagcatggggagatctgataatctttggatttgtttatctaactgcttgtgatgcctgaaagtgggtgtcatgagtgaattggggatacattattacagcaattggtggtgtgatcagtgcaataactctgttttataaagcatttgatagtagcaagcaacaatcactcaccacactgctacagcaaaaggatgaagaaattaagcagaaagaacaggatgctgaaatctacagaaaaaaatggctagatgccgaaaaagacaatgatgaattaagaaagaagttaaaaaatgacaattagagactggttatatttaggaattacaattgctagttatgtaattgcaattatcgcaggtgtttacgctagaaataaagctaaaattaacaaggcaactacagcaggcaaggcacttgatgtagtaggacaacttgcaacctatgcagttcatgaagcagaacacacaggtatgggaaacgaacagaaacgtgaatttgctagtcaagtgattgtacaaggtttaaattatttaggtattaaaaacgttactgcaaacgtaattaacggtgcgattgaaaaagcagtaaatgctatgcacttagctaacatggaagacagcgatgaaattactgttgctcctgtacctgataatgaaattctgaaacccactgatcaattgactgctcctgaaaatcaaccacagggagatgttaataatggttaggtattttggcgtggatgtagcagtatatcaacccactagcatgtcaaattacattagccatggtgctaaattcgtgattgcaaagttaagtgaaggcttaagttactttaatcctaaggcacatgctcaagttaagagcacacatgctaaccatgcttacttacatgcttatcactttgcgacttttagcaattcggtttcacgtgctaaaaaagaagctaaattctttgtgcaccgtgctgaaattgaaggtattagtaagaaacggtatctatggttagattgggaagttggcgatggtaatgtagttactagatcagttccatcaaatactgctgcaattattgcatttatggacgtttgccacaatgcaggttataaggttggattgtattcaggtgctagtgttttacgtaataacattgatactaaaaaagtgattaagcgttttggtaattgcttatgggtagcttcttatgcaactatgggcagaattgatacacctgactttaattactttccatcaatggaaggcgtagcaatttggcaatttactgataactggcgtggtcttaacgtagatggcaatattagtctaattgatttacattcagaaaagaaaacaaatcagccgactaatcctaagccaattacaaagcctaaagagaaaatacctaaaattgtatttgttcctattattaacaacaatccaaactataaagtaagattgctagatagtaatgggcattatcaagataaatacattcccactaactcaaattggaaagtatgggatgtaaaaacaattaaaaatgtgaaatactataagattggtactgataagcaatgggtaccggctaaattctgcaaagtataaaaaaagaaggaagtgaaaaattcctctctaaatctatcaagaaagccactctggacattgtgtctggggtggcttttttgcgttataatataagtgttgtaaatgttattttgctaagagaaaaacaacgataatgtcagctaaaaccactttgaattaattttcaaggtggtttttgttcacttaataatattttgtgctacaatatagttgttcttttgatagagaaagcgcgaagctttttcgtttttaatccttaagcaagaccacagtgagagctgtggtcttttgtgttataataactgtgttgagtttattaattgtctataaaagcaagaacattaccctgaagatagctgttaaaggctatcttatttttatagaaaggtttaaccatgaaatttgtagtagtaactacactccattatggtgatcataaaatgtatgatgatgctagattaatgaatgcactagatacaatgagctttgagtggattgaagctcaaaaattctggggatcattagtactagatacttataacattgactataaaccagaagacaagatagcagtcattgaattaaaagacattagccaattagcattattagctgaagtagaaaatgataaaatctacattgattatgataagcatgtgattgtacctgcttactatgcagttgatgattaaacgtgtatactatagctactgcagtaattgtctctatagacttctaggtaattactggctatatgaaatttcagattaagcatctaaggtttgtcacttagatgcttttttagtaaaaatgctgttgcacaaatgttgcacaacagcatattagagtaaaaaaagaccttgttagaatattgatctaacaaggttttggttattaggcacgagtaactttaccagactttaaagccttggttgaaacccatacgcgctttggcttaccgtcaacaagaatgcgaactttttgaaggtttggcttccaagcacgacgagttgagttcaatgagtgtgaacgtttgttaccgaatgtagtcttcttacctgttacgtaatcttttgccatttgctaaacctcctttaattgtgatgtcatacttaattagattatcatatgttttcgcgcaattcaatactaaaaggattttttcaggtgtattttaattattgattatgtcgttactatgataaaataataaacgtatatatagataataagacggaggacgaaacatggctgttaagatcaagacaaaagatggtttgattgatatttcaaacggtgtaatcgcaactgttgttggtggcgcagctacgtctaactatggcgttgtaggtatggcatcaaagaatgccattcgcgatggatttgacgggattcttaatcgtgccaattataagcgcggtgttgttgtcaagtcagaagataacgaaattacggttgatgtgtacattattgttggttatggtttgaagatttctgaagtaagtaagaatgttcaagatagtgttaagttcaatttgaagaatcaattaggaatagacactaaggccgttaatgtcattgtacaaagcgttaaggtacttgacgaataacacaggcggaggttttaaatagtggttttaaatgagatagatagtaagcaatttagagatatggtacgtgttgccactcatcgaattggtaaaaatgcggagtttgttaactctttgaatgttttcccagttcctgatggtgatactggtactaatatgaacttaaccattgaaagtggtgctaaggctgtttcggaaaatccaagtactagtgttagtgatttaactgaaagcttggctaaaggtatgctaatgggtgcccgtggtaacagtggggttatcacttcacaattattccgtggcttttacaaggctacccaagggatgaagaccttaactgcacaggaattagcaaatgctttttcaaatggtgttgctactgcttataaggctgtaatgaagccagttgaaggtactattcttactgtagctcgtgttgctgcacaagccggtgctactaaggccaataacaccgacgatgtaactgaagtaatgaaagctgtagttgaaggtgctaagaaggctcttaagtcaactccagatttattgcctgttttgaagcaagttggtgtagttgactcaggtggtcaaggccttttgtttatctatgaaggctttttggaaggcttaatgggtgaaaactttgcagatcaatatcaacctgacgaaaatgaaatggatgaaatgatcaatgcaatgcaccaccaatcttcagttcaaagccaattggctactcaagatattaaaaatggttactgtactgaaatcatggttgatcttgatgccgatgtgccaaataaaaagaagtttgatttggaagaatttagaaagcacttgtctggcttgggcgattcattattagctgtttctgatggtgaaattgctaaggttcacgttcatactgaacaccctggtgatgttttccaatacggtagtcagtttggtcaattaggcaagatcaagattgataacatgagaatccaacacgaaagcatcgttgaccaagatgaagaacaacaagaagcagttgattttgcagtgatcgcagttgcttcaggtaacggtattcgtaagttgtttgaaagtgaaggggtaaaccgtattatctcgggtgggcaaacgatgaacccatcaactcaagactttattgatgcaatcaagaagtctggtgcgaagaaagctattgtcttgccaaacaacggtaatattgttatggctgctaagcaggctgctgaagttagtgatattccggttggtattgtaccaactaagactatttctcagggtttaaccgcaatgctttcattcaatccagatgcatctgttgatgaaaatgtggaagctatgacagaggacttagatacggttgtttcaggtgaagttactcaagctacccgtgatactgaaatcgatgaagtagaaattcataagaatgactacttgggaattgttgatggcaagattaaggttgacaatgctgatttaattaagactactgttgatatgattgaaaagatgctggatgaagattcagaaattatcacaattatgtttggccgtgatgctagtgaagagcaagcacaagaagtagttgaacaacttgaagccaaacatgatgatcttgaatttgaaattcatgatggtggtcaacctgtatatcacttcttagtatcagttgaataacaatgattgataatgcattatttgctcctgtcacagacttaaagggtgtagggacaaagactacagctgcattaggaagcttaggcatctatagtatttatgatttgcttttttactttccttttcgttatgacgaattacaaacattaccgttagatcaaatcatggatggtcaaaaagtaatgctaaagggaatagtagccactgaagcgtttgttagtcgttttggctataagaaaacgcgcttaagtttcaagatgagaattgaccatgatgtgatcatggtcaatttttttaatcagccgtggttaaaaaataaaattgagatcggacaagaagtagctatttatggtaaatacaatgttgcccggcaaagtttaacggcctttaaattcgtagcagccaaagaaaatgatagtggtatggcgccgatttatccggttaatcgacatgttaagcaaaaaaaattagtagatctaattaatgtggctattgacgattttattgatcaagtgcaggatattgtttcggaaaagttgcggcaagaatatcgtcttttaaaagaccaagtaattattgaaaaaatgcaccaccctaagaatagtcatgaggctgaactagctaagagaagtgcgatttttcgtgagttttttatttttgaattacaattagctttattgacccgtaatgatggtaaacaaatgggttatgcaaagaaatacgatctgacagaaattgctcaattaactaaatctctgccatttgaattatcagatgatcaaaagcatgtggttaatgaaatctttgctgatatgcattctgatggtcaaatgcggcgacttttgcagggtgatgttggttctggaaaaactgttgtagccgtttatgcgatttttgcagccattacagctggctatcaggcggctttgatggtgccaacagaaattctggcaactcagcatttcaaaaaaatcgatgaattgttgcgtcctttaggtgtgcgagtagctcttttaacaggcaatacaaaaacactggagcggtgtgagatctaccgtgaattaactgatggcacgattaatgtggtaattggcactcatgctttaattcaagatagtgttatctttaaaaaattaggtctagtcattattgatgagcagcaccgctttggtgtaggtcaaaggcaagctttgattaataaaggcgatcaaccagatattttggcaatgaccgctacgccaatcccgcggacgctggctttgacagtttatggtgatatgacagtctctgaaatacatcatttaccagccggaagaaagccaattatttccacatggaaaacaagtagtcaaatgaaggaagtctatcgacaaatgcaagagcagctaaatcaaggctttcagatttacgctgtgacaccattgattaccgagtcagagacgttagacttaaaaaatgcagaagaattgcatgaaaaattaagccatgattttcctaatcacaaggtagtcctgcttcatggtcaaatgccaggtgcgcaaaaagatgagattatgactgcatttgcagctggtgagatcgatattttagtaactaccagtgtgattgaagttggagttgatgtggctaatgccaatatgatggtgatttataatgctgatcgttttggcttaagtcaattgcaccaactgcgtggtcgaattggtcgaggacaaacacaaagttattgtgtctttctagctgatcctaagaccgattcaggtaaagcaagaatgaaaattattgcgtcgaccaatgacggcttcaaattagctgaagaagatttaaagatgcgcggtgaaggtgatttgtttggtaaggctcagtcaggattgccagaatttcgtgtgggtgatgtagtaaataactacaatacattggtcgttgcgcaaaaagaagcacgagctttggttgcggctgatcctgatttattagatccaggacataaggcacttaagcaagtgctagaatataagcaattagagcaaaacagaatttagaaaagattgtggtgaatatatgagaacaattgcaattgatgcgatgggtggcgaaaatgccccagatgcaatcgttaaggcggttttacaagctaaaactggaatgcctgagactaaatttttattatttggtgataaagaagcattaagaaaactaatccctgaagatcaaattaatgatcaattaggagttgtacctacaactgaagttattgctgatgaagatgaaccagttaaggcaatcagaaaaaagaaagactcttcaatggttgtggcagctaacttcgttaaggaaggaaaagctgatgcgttgctttccttaggcaatactggtgcattgcttgcttgtggaatttttattattggtcgaatcaaggggattgttcgtccaggtttgatgcctactttacctgttcaaaatagtgacgatggcttcaatatggttgatgttggtgctaatgctaagagtaagccagaatatcttttacaatgggccgaaatggcttcgtactatgctgagaagattcgcggcattaaaaatccgcgagtaatgctcttaaataatggagctgaaagcgacaagggtgatgatgttcaccaaaaggcctatgaattgcttaaagaaagtaatttgaatttcttaggtaatattgaaggtaatgaattgctattaggcaaggcagatgtggtagtaaccgatggctttaccggaaacgctgtacttaagaacattgaaggaacctctagcgtcttgcttcatttattaaaagatagtttattaaatggcggtgtaatgaccaagttaggtgccttaatggtgaagggctcgttatcaagcttaaaatctaaatttgatacggctaaatatggcggtgcagttttactaggcgttaatgcaccggtagttaaaacccacggtagatcaaatgaacgtccaatttatttcactcttaagcaagtagataaaatggttaaagaaaaacttgttgcagattttagagacgaattcgctgaaaaatagtacaatgttttattaaaaaggagaagttttatgtcagaagaagaaatttttaataaaattaaagacatgatcgctgataattttgatgttgataaggatgagatcactgaagacactaattttatgaacgatttggatgctgattcaattgatttggttgaatttatcttgcagctagaagatgaatttggcgcagaaattcctgatgatgaagctgaaaaaattaaaacaattggtgatgctgtttcatatattaagtctcatcaaggataattttctaaaaaaagccgtgtcgtgatttgcatacgaccggctttgtgtttagaattagaaaataaatagaaaagattaaatgcttttaataaaaaagctcgagatggaggaatgacctttggagaagcagagtgatcttttattagatattcaacacctgcatacggcataccgtttgcaagggaaattctatgatgcggcagacgatgttaatctgactctgaagcgcgacgagattttagccatcgttggtgaatctggttgtggtaagagtacaattgcctcaagtatcattggattgtacgaccataaaaatactaaagtaacaggggacattctttacaatgaattaaacctagttggcttgaatgaatcacttttcaataagattcgtggggacaagatcggaatgatcttccaggacccattagccagcttgaacccattgatgcgtgttggtgatcaagttgctgaaactctttattaccacactgatatggacgaaaaggcacgtcacgcacgtgtcattgaattgtttaatcaagtaggaatgccaaagcctgaagaaatgtacgaaatgtacccacatgagttgtctggtgggcttcgtcagcgtgttgtaattgcgatggcgattgcatgtaagcctgaagttattattgccgatgaaccaacaacagctttggatgttactattcaagctcaaattttggatttgcttgaagatattcaaaaacaatctcactcagggattattttgatcactcacgacttaggtgttgtagcagaaactgctgatgaagttgcagtcatgtatgctggtcaaattgttgaaaaatctgatgtaaagacaatttttgaaaacccacttcatccatatactcgatcattacttaactcaatgcctcaatcagacgatacggatgaagatcttcatgtaattcacggtactgtgccatctttgaagaatatgccacgtactggtgatagatttgctgcaagaattccttggattcctgctagcgcacatgaagaagaacctaaggtgcatgaagttgcgccaggtcactgggtaagatgtacttgctggaagtcattccactttgaggatgaaaagacagcaagtggggagtagtttatggcaaaagaaattattcaaatcaaagatttaaaggtctattacccaattcgctctggattttggaacagaattactgattatgtacgtgccgttgatgggattaatttttcaattggtgaaggtgaaacttacggtttaatcggtgaatctggttctggtaaatctactaccggtaaggcgattgttggggttgaaaaagttacaagtggtcaaatcatgtataagggtttggacgtaactaaggcaagcaaccgtaagaagcttgattataataaagatgttcaaatgatcttccaggattcaatgtcaagtttgaacccaagaaagagaattgaagatatcattgcagagccaattagaaactttgaaaatctgactactgatcaagaacgtgatcgtgttcaagaattgttggatattgtagggatgcctagtgatgcgatctacaagtacccacatgaattctcaggtggtcagcgtcagagaatcggtgttgctcgtgccgttgctactaaccctaagttaattgttgcggatgaaccaacgtctgctttggacttgtcagttcaagcacaggttttgaacttcatgaagcacattcaacaacaatacaacattgcttacttgttcatttcacacgacttgggtgttgttaagcacatgtcagaaaacttggcaatcatgcaccgtggtcgtttggttgaattaggtagccgtgaagaaatctacaagcacccaattcacatctatactaagcgtttgctttccgctattcctcaagttgatgttgaacatcgtgaagaacacaagaaacatcgcgaacaagttgaaaaagaatttgaagaaaatcaaagtaaatggtacgacaaggatggtcgtgtatatccattacaacaagtagcacctaagcactgggtagctttgccaaaagatatggcccacgaagctaaacttgaagaattagaagaaaaggagagtgattaagcatgtggaaaacgattttacggcgtttgttaatcatgatccctcaattgattatcttgagtttgctggtcttccttttggctaaaatgatgcctggtgacccattcagtggatcaattaaccctaacaccgaccctaaacaaattgaagccttaaaacgggctgcaggtctgtttgatccatggtacgtgcaatactttagatgggtgggcaacttgttccatggtgaccttggtacaagttacattcaacatgtgccagtaacttcattgattgctgaccgtgctaacaacaccttctggttatcacttttaactactattttgacttatagtattgctatccctcttggtattacttcaggtcgtcaccaagacgaatggcaagatactagtgttagaatttttaactacatcaccttggctaccccaggattcgtattctacatcttaggtttgtggctcttcggtttcaccttgggttggttcccaatttctggttctgtttcagctagtgcctctggtttctggggcgtacttggcagtagaatctatcacatgattttgccagcaattctgtatgccttgattactactactggtactgttcagtacttaagaactgggattgttgataacaaggttgaagattacgtaagaactgctcgtagtaagggtgttccagaaagcgtcgtcttccataagcacattttgcgtaactcattattgccaatcgctgccttcttaggtaacacgattaccggtcttcttagtggttcaatgatcattgaaagtgtatttagttatcctggtatgggtaagttgttccttgactcaattgggcaacgtgactacactaccttgactgccttgattcttatctttggtatcttaactttaatcggtaacttattatcagatatcatcatgagtatcattgacccacgtattagaattcaataggaaggagagaaaaaatggctgataagaaagaaaaagctacaaagaaagctactaaaaaagacgaaaagcaaaaagcaactctcccaccttctggattcaaggtggcaatgcgtgaaattgtgcgttcaaagtctgctttaactgctctgattatcattattgtcattttactgtttacttttggaggttcattattcttgaatcgtgcccaagtaacagaaatgaatattgctgactcatactatggttggggtgaagcgggccacttgctaggtacggatgatggtggtcgtgatatcttgaagttgctcatcatgggtgggcgtaactcaatcatgatcggtatctcagtaactgtaattactgaaatagttggtttagtagttggtttggtatcaggctactttggtggtgcaatcgactcagttatcatgagagttgttgacttcattcagattttgccacaaatgccaattattattgttttgactactgttatccctaactacaatgctgtaactttggtattcttgattgcgatgtttgggtggacaacgacggcacgttacttccgttccttcgtcttatcacagcgtggtcgtgactatgttttagcatctaagacttcaggttcatctaatttacaaattatgttccgtgaagttttgccaaacattacttcaatgattattatcgacgttgtattgagtattgcaggtaacattggtattgaaactagtctttcattcttgaactatggtttaccaagtaccacgccatcacttggtactttgattggttttgctaatgacccagttaacgttattaaccgtccatggttgtggttgccagctactatcttgcttttggtaatttccttaagtattaactatgttggtcaagccttacaacgtgctggtgacgcaagacaacgtgaaaactaataaagtaataattaaattaaaacagctctatcgcttggtagagctgtttttgcatatttataactagaatcttattgaaagcaaataaaataaaaattaaaaataatttcataaaactattgaatttttaatttatggtggtattatttaatcatcaacctgattcaaataactattgaaaatgaattgtatcctagatgggggaaacaaagtatgaaattatcaaaagtattgggttcagtaggagtcgtttctgcggcagcgttagctttagttgcttgtggtaagagtagcagtaacaatgctggcgcaaaggatgccaagaagtttaaggaaactactccagttaaggcagtcaaaaagggcggcactttatcatatgctgaagaaactggtacaccttttacaggtatttttaacaatgaattatcaacttctgctattgacacagatgtagcacagtttggtaatgaatcattatttgatactgatgacagttacaagattaatagcaagggacctgcaacttttaagttggaccgtaaagctaagactatcactaagtgtataattttttacggtaagttgaataaataattaaaaaagcccaagtcctttgaatttggacttgagctcaaacaaaaagaccagtagtctgatgttaagaacaaaaaacacattagaagctggtcttttatgaattcaattgtaactgaaatcgcaaatattataaagtctgaagataattatattaagcgtgaaagaaaaataatctgtttcttcttaaacctgattaaggaaatcatggccttggctttagctaaagttgatgatgaaatgattaccaaggttaaagcacagggctatcagattgataagaagaatgagcgctcaatcaatatggcttttggcgaagttaggtatgtcagaagaagatatgtctgcccaggcaaacaagcaaggtatcccttggatgaattaatgggctttgacaaatacaagcgctacagtattttagcagtcaaaaacatcttagaagtaagcagcgttgccacttatcgcaatactgctctagcagtcaattgcctgtctggctttaatattagccatatgcaggtgggcaatttggtaaaaatggccgggaaaaatattaaagcgggccaagaagcagattcaagatatgatgccgcaggcactaagaaaaaggtcccagttttgtatcttgaaggcgatggcgtggtgatcaaaggcactaaaagccggttggaatttcatcgctatcaggtctgtgaaggcattgtcaatataagcaagaaacgcagaaagcgaatcaatgccaaggaatttgtttctttaagccgacttgatgcgctgaacgaagccaaggagtacctggccaatacttatgatctttctgatactgtaattcttagcaacgccgatggcggtgctggatatgccaaaacagacttcgatgacattgtagggctatgcaagcgtcatgagcatttcttggatgtctttcacctaaataagaaaatcaaagaaaggctatattttgcgcctgacctgcaaggcaagctgatttctgctttggaatacaaatacagctatgacaaagttaaaactatcctaaccactgcagaaagccgactaattgatgaattgaataccgagctcaatcatgattatctggggcgcctaaggaattatattgatcgtcattgggacgatattaagccgtttaagaaacgaaaactgactgtgactaaagccattggctgctgcgagagcaaccaccgcaagtatacctaccgtgttaaggggcaaggcaagaaatggtcaaaatctggagcagaaggcatgcttaggatcttaagctgcatcaagaatcgagagctggaattttggcttagcagcgagtttgaagattcagaaataactgtattgactgaacaggaattaaaagcagcggcccgtgacagcttaaagaagcgtcatgaagttcatttaggcatccagcatggcgcattaaccgcacaggtagctggcaatagttatttaagcaagctaagcagaaatttaagtcatataaatatttaagaaattaaggttagactaatggtttaaaggctaccgcaaaaacattgacacttacagactatcactattgaagttaaaaaaggtgttaagtggtaagatggtaagcaggttactgcaaaagatgtagagtatgaatatgaagttatggctaacaagggcacaaagtctcaacgttatactgcttcacttcaaaacattgttggtgtaactgaatatcatgatggcaaagctaagactatttcaggtattgatatgccagatggagcaaatggacgtaaagttgtaattcactttaaggaaatgaaacctgggatgcttcaatcaggtaacggatacttcctcgaaaccgcaagtccatatcatcaattaaagagtattccatttaataagcttgaatcatcagatgctgttcgtaagaatcctttgttctttgggccatacaagattagtaaaattgttcgtggtcaatcagtaacttgggttcctaataaatactactggagaggtactccaaaattagataaaattacggtatctgtagttaaccctaactctgcttctcaagctattaagagtcacaaatttgatattgctagagttgttaattcacaatggcaacaggttaagaacactaaaggtgttaactttgttgctaaagtaccacttcaatacagctacatgggcttcaaggttggtaagtgggaaaatggtaagaatgtcatgaacccaaaggcaaagatgaacaataagtcacttcgtcaagcaatggcctatgcaatgaacattgatgctgtggaaaagcgttatactcaaggcttaacattcagagtacctactttaattcctgaacaatttggaaattactttgacaaaaatattaagggatacaattataaccttaaaaaggctaataagttacttgatgacgctggctacaagaagaaaggtaagtatcgtgttcaaccaaatggtaagcctttgaccattcaccttgcagctatgtctggtagttctactgctgaaccaattactcagaactacattcaacaatggaagaagatcggcttgaatgttaagttaacaactggtcgtctaattgaattcaattcattctatgataaagttcaacatgactctaaagacgttgatgtattcatggctggttggtcactatctagcgaaccttctcctaacgatctttacaatgaaaaggcaccatttaactacactcgtttcgtaactaagaagaatactcagcttcttaaggacattgactcacaaaaggcatttaataataaatacagagtacaaaaattccacgaatggcagaagtatatgtttgatgaagcatatgttgtgccaacagttaatgcataccaaattgacgctgtgaatagtaagcttactggctactcacttaagccttcagatgctaactcagtttggtacaatgttggttacgctaagtaattcattaatcattagtaaaactaaactccaaaattctaaacataaacaaattccttatattaaattctaataactaactaatagaaaagacaggtatcttaatccaaatacctgtctttttcatgctattgttatgtttttgtaatagtgataaaattaaaggatcaacttgctccaagtaatggaggaattttactaatgaaaaaggcaaaactttttgctggtattacactgttatcaggtgtagctcttaccttagctgcctgtggtaagtcagaatctcattctgatgaatcaaagactgcttctaagtttaaggaagctgttcctactaaggctactaagaatggcggtactgttaaggttgctgttgaagctgataccccatttactggtatcttcaacgacgaactttcaacttcagctactgatactgaagttatgcaatatggtgcagaatcactttttggtactgatgatcactatgttttcaatgataaaggtgctgcaacaattaaggttgaccaaaaagctaagaccgtaactgttgaaattaagaagggtgttaagtggtcagatggtaagcaagttactgccaaggactatgaatacgcttatgaaattattgctaacaaagacactaagtcacaacgttacacttcaagtttagctgatttggaaggcttacaagaataccatgaaggtaagtcaaagactatctcaggctttgaaatgccagatggtgaaaacggccgtaaagcagttcttcactttaagacgatgaaacctggtatgaacacttcaggtaatggttacatttgggaagctgctgctccttaccactacttgaaagatgttaaattcaaggacttaatgtcaagtgataagatccgtaagaagccattgttctttggtgcttacaagttgcaaaaggttgttcgtggtcaatcagtaacttgggttcctaacgaatactactacaagggtaagccaaagctttcaaagattactgctacagtaattaaccctaactcagttgctcaaagtattaagtccagaaaatttgacgttactcaagtaatcaactcacaatggaagaacatcaaggatactaagggcgttaactttatcgctaaaattccactacaatactcatacttaggctttaaggttggtaagtgggatgccaagaagggcgaaaacgtaatggacaagaattctaagatgaataacaaggccttacgtcaagctattggttatggtatgaatgttaaccaagtttacaagcgctactcattcggtttatcattcagaattccaactttaattcctaagcaattcggtgattacttcgacaagaacatcaagggttacacttacaatatcaagaagggtaacgaaatcttggacaaggctggctacaagaagaagggtacttaccgtgtacaacctaatggcaagcctttaactattcgtttagctgctatgactggtagttcaacagcagaaccaatcgttcaaaactacatccaacaatggaagaagatgggcttgaacgttaagttaactagtggtcgtttaatcgaattcaattcattctacgacaaggttcaaaacgatgatccatcagtagatatgtttattggtgcatggtcattatcaagtgaaccatcacctaatgacttgtatagcgaaaaggctccaatgaactactcacgtttcgtaactcctgaaaacaccaagttacttgacgaaatggattcacagaaggccttcaaccacaagtacagagttgaaaaattccaagaatggcaaaagtacatgtttgatgaagcttacgtaattcctatagctaatagttactcaattactgccgttaacaagaagcttactggttactcacttaagccatcggattcaatgggtaatggtttccctaactggtacaatgttgcttacgctaagtaaagcaattatttaaaattacaaaagactgtttctaaattttagaagcagtcttttttctgtgacccgaaaactggtataatttataggtataaaaaggggcatttttatggtaagtacaaagtttttaaaaaaattaaaagacgattataatatcgaatttaacaatgaaaagctattagaagaagcatttacgcattcttcatattcaaatgaacatcccaatgatggaattcgcgattatgaaaaactcgaatttcttggtgatgctgtgctagaattagccgtttcgaattatgtttatcttcattatcctaagttgaatgaaggtgaattaactcgtttgagatctaatattgtccgaactgaaggattttcagaattcgccattgaatgtggttttcaagatgagattcacttgggcaatggtgaagaaaaagctggagcacgacaccgcaaaactttactggaagacgtgtttgaagctttcaatggggcacttttccttgatcaagggatgccagcagttgaacattttttgcatttaacagtttatccattgattgataagggtgaattcgatgattcacgcgactataagacagacttgcaggaagtattgcagcaagatggtcctgtgaatatcgaatacaccgttattagtgaatctcaattaccttcacactttgttgttgaactaaaaattaacggaaaagttgaatcaaaaggtgagggtcacaataagaaagcagctgaacaacaagctgctaaggtcgctttacaaaaattagaaaaataaggggatgaaaaagtgccattaacagaattagtgctcgatggttttaaatcattcgctgataagacaactattcattttgatgatggaattactggaatcgttggtcctaatggttcggggaaaagtaacattactgaagccgtacgttgggtaatgggtgaatccagtgctaagtcactacgtggaacgaatatgaaggatgtcatctttgccggtagtcaatttcgcaagccgctcaataaggcggaagttactttagtttttgataataaagagcgtgagttggcttttgattcagatcaggtctcaattactagaagatttctgcgatcaggtgacagtgaatttttaattaataatcagcaagtgcggatgcgagatgtgcggacactctttcttgattctggaatttcacctaatagcctagcaattatttctcagggtcgagttgatcagatcttaaattctcgtcctgaacaaagaagagtaatctttgaagaagctgctggtgttttgcattttaaacaacaaaaagaagctgccaaggcgcaaatggagaaaaccaaggataatttaattagaatcaatgacttggttaaagaacttgaaggtcgattggagccgctgcatgagcaaagttcgctggctaaagaatatcaatttcaaaagaagggactagatcagaaattaaaaagtctattagcttttgaaattgaggatttaaaccggcaaaaagaagaagtccaaaaagcagcagataggaaccaaatcctgttaacaaaactggataatgaagtaaaaggttcgcaaagtgctgtttctgaaaaacgggcagaatatcaaaaaattcaaaatgagcgagagcaaacgcagagtgaattattaaagctaagtgaccaattatcacagatcaatactaacttgcaggtcgcacagcaatcacaacagtttaataattcaactagggtagaaactcaacgtcaagttgaagaattgaaaaatagcttggttaagctaaaggatgaattgtctgaactgcagcggaataaaaagcaacttaagcaggagcaagatgctttacaagagcagcatgatcaattgactggtaaattgcacgatgatccagaagaattgagtaagcgactagaagattgtcgtaacgactatattcaacttttacaagatcaggctacaactaataatcagattgttaatctgaatactgaattaaaacgtagtcaggcagacactacttatcaaaatagtgatgtaagcaagcagctaaccgatgctcggactgaactggaaaagctgagaactgaaggcaagcagctgacagttaagcggcaaaaggaaaaagaaaaatttgcgcaagttaatgatcaaaataatgatttaactaaacagattaatcagattcggcaagccgttaacgcagagcgcagtaaattagagaaagttgaagcgcgacatgaagctttagtaaatattcaaaagcggcatgagggttattactacggtgtacgtaatgttttgaatcatctatctgatttccttggtgtgatcggggctgtgggtgaattgattacatttccagttgagctagaagctgcaatgacgacagctcttggcggtggcgtacaggatttgattactgaaagcagagttagtgctagggatgcaattaatcaattaaagcgtagtcgtagtggacgagctacttttttaccattagatggcttgcgtcaatatactattccacagtcaactatcactactttgcaatcttttagtggctttaagggcgtagcaagtgatttagttgaaagtaaagccgatcaagatattactgctgcgattaattatttgctgggtagtgtgattatcgttgatacgattgatagtgcaatgtcaatttcacgtcgagttaaccgctatcggattgttaccttagatggcgatgtgatttccccaggtggttcgatgactggtggtcaaagaaaccaacgtaataattcaccactgcagacggcaactgaaattaatcagttagagaagcaattacagactttacgacaaaatttggctgaagatcaagaacggttagatgagctagttactcaaggtgaaaaagttgcggctaaattgcaacaactgcgtgatactttgcaggagactaatcaagcgattaatgaagctgctatttctttccaaaatcaagaaaaggaagtaaagcggctaactgatgctaatagtttatataaatctcgagtaaaagaacaacaagatcggattgctgctttaaagaaagaaatcactcaggctaatgatcagcaggaacaattggctaagcaaaatgaagtacaaaagggcaaaatgaatgacttgcaagaaaagattaagaacttcaatagcttaagtcaacgtgtacaagaggaattatcaaagcttgatcctcaaattgcagtttatactaataagttggaaaacttagctagtcaggaaaaagaaaaaaatattcagatcactaataatcagaagcaaactgatagcttagagcagaaattaactgaattaagtcaaaatggtgaattatcagttaaaaagaattctgatttacaaacacaaaaagctgaaattaagcaaaagaatgaaactctgcaaaagaagctgaatgaacttagtgcgcaattaggacaagttgatgcgcagattaatcaacttgaccaagttgccagtcgtaattatgatttacgcaaagatgcagcaattgaacaagaagattactcagtaaagattgcgaagtttaattccgcaattgatcagcgcttgtcaactttgagtgaagagtatgccttaacgtttgaagctgctttagagcaagcagaaggcgaaaatactgaagaaaagcgcaatgaactggctaaaagcgtgaagttgcatcacatgtcaattgaagatattggccaagtaaatcttgattctattcaagaatatgaagatgtgaaaaagcgctatgactttttgaatggtcagcaaaatgacctgttaaaagctcgtgatgaccttgaaaagtcaatgaacgagttagatgaagaagttaagacgcgcttcaagagtacctttaatcaagtagcatctagctttaagagtatttttccagttgtctttggtggcggtaaagctagattggaactcactgagcctaataatttgctagaaactggaattgagattatcgcacagccgcctggcaaaaagcagcaacgtttaagtctgctttctggtggtgaacgcgcgttaaccgcaattactttgttgtttgccatgttgcaggttaatccggtacaattttgtgtacttgatgaagtagaagctgccctggatgatgcaaacgttactcgttttgcgcaatttttgcttaaatacgatatgaaaacccaattcatcgtgatcacgcatagacgagggacgatgcggcaggctgaccaactatatggtgtggttatgcaagaatctggcgtttcgcaagtattgtcggtttcattaaaagaaatgaagaataaaaatgaggtgaaatagttgggtttatttgatcgaataaaaaaatcactctttggtaaaaaagacgaagaggatgaaaacaaaaaagaagaaaaacagactgagcaagaaaatgaagctaagactgaatcagaagataatgatcaagaatctgaaaaagtagttgatgaagctaaatcgaaaactgaaactactgatgaagaagaacaaacagtagaagcacaagaagactctgaggtagaagctgaatctggtgatgaagaaaaagcagtagatttagattctaaacaacagcctgaagaagttaaagtagaagagactactgagactgaaacagaagaacaagttgaagaaactgaagtttctgatgaggagccaacagaatcacaagaacagctttatgaaaaggggctagaaaagactaacaagggatttggtgcaagacttaacgccttttttgccaagtttagaacagttgatgaagatttcttcgatgatctagaagacttattaattgaatctgacgttggctatgaaactgctgaacaattaactaatgaattgcgtgaagaggctaaattgcaaaatgctaagtcacgtgatgacttgaagcgagtaatcgttgaaaagttggttgacctttacgataaaggtggcaatagcgaagatgagcaattgacgtataatgctgaagctaaacctaacgtttacctacttgttggtgttaatggtgcaggtaaaactactacaatcggtaagttagccaaacgttttaaggatgaaggaaagtcagtaattttagctgcggccgatacctttagagcgggtgccgttgaacagctagttgaatggggaaaacgtgttgacgtacccgtagttactggtaaagaaaaggctgatcctgcttctgttgtttatgatgcaactgaacgggcaatcagggaaaaagctgactatcttttagtcgatactgcgggacgcttacaaaataagaagaatttaatggctgaattggaaaaaattcaaagaacaatcaagaagcttttaccagatcagccaacagaaaccttgcttgtgttagatggttcaaccgggcaaaatgcgcttttgcaagccaaagactttgacaagaccaccgaattaactgggcttgttttaactaagttggacggctcatctaagggtggtgtagttctagctatccgtaacgaaatgaatttgccggttaaattggttggcttaggcgaaagagctgaagacttagctgattttgatgctgcaaattatgcgatcggtcttttccacggcttggtctagtgataaagttagagatgtaaatattgttttataaggagaattttatgaaagaatatagtgcttgtactactatcttagttggtaaaaatgcctcgattgatggcaccactatgattgctcgtaatgatgacacttttcgtccaattaccccacaaaagttcattattgagccagcccgtcatggtgaaaagaaacatattaagtcatggttaaacaagtttgaaatggacttgccagaagatgcgcaacgtgtaccagctgttcctaatgttgactacaagcatcgtggctactacgatgaaagtggaattaaccaagaaaacgttgcaatgtcatgtactgaatcaacttatggtaatgagagaactttagcatttgatccacttgttaaagatggattagatgaagactgcatgcagacttctgttttgccatacattcattcagctcgtgatggtgtacaatatttaggtaagttaattgctaagtacggttcaccagctggtaactcagttttattcagtgataaagatgaaatttggtacatggaaattgttacaggtcaccactgggtagccgagcgcattccagatgattgttacgctgcaactggtaatcgagttgcgattgaacaagttgactttgataatcctgattacttcatgtggagtaaaggtattcaagaatttgttgaagaacaccatttgaacccagatcatgaaggctggaacttccgtcatatttttggtacctatactgaacaagatcgtcactacaacaccaaccgtcaatggtatattcaaaaattgttcaatcccgaaattgaacaaaacccacaagatggcgatattccatttattcgtaaggcagctaagaagatcactaaggaagatattcaatttgctttaggttcacactaccaagataccccgtatgatccatttggtaagggtacggatgaagaaaaacatcgctaccgtccaatcggtttgaaccgtacgcaaaatgctcatattttgcaaattagaagtgatgttccagcagatcgtgcggctattatgtggttatgtatcggtggtccaactttcactccatttgtaccattctttgctaatatgaatgatactgatccttcatataacaatacctcaatggattacaatatgaatgatgcatggtggtattacaagtcatttgcagctatcgttgaaagtcattacccacaatttgttcagcttgatactacttatttaactgaacttaaccgctacttcagaggtcgagttgaagaaattattgctggtgcagaaggtaaatcaggtgatgaattaactgaatatttgactaaggaaaatcaaaagactgttgcccatactcgtaaggaaactgaaaagctttggggtcaaatgatgattgaatcgatcaacatgtccaaacttactttcaatatggatgaaaatctttaataaattcaaaacagctcgaaaaagggctgttttttataatatgtgaaatgaaaggaatatagacaatggcagaaggtactattggctcattttttactaagattaacaatgaagttgaaaaacaaatgaataacgatttaaaaaatttggtattaatgctaatgaattggaaatgcttattgaattaaatcatcatcagcatggcaaaacttttgaaaagttggctaaagaattgcatgtaactaatgacaaggtcaaatctttgacaaaaaaattggctgccaaagatttgtgcaagaaatttgaaaagcaccgtgcagaaactgaccaaactattacagggatgctcagtaaagatgaaactcttggcttggttaatgtactgaaaaagatgcttaagtcgagtgaagacaataagtaatgtaaaatagtagaagtgtctgggaaaaaactaagtctcagatcatgaaaaaagaacgttgaatttttgtttcaacgctctttttgtatacttttagctccagccttgatattattaaatcatcacaaaataaaaaaggtggaaactaacatgtacaagaattatatcacaggtcaaactgctttaacacttaatctagattttgccattccggccaatcatttggctaatgtcatcagctggtttgtagattcaattccagaagatgttttagtaggcaagactgctaaaacgggccgcccagcctatcatccagccatgatgctcaaaatactgctttttgcttactccagaagagttttttctggcagaaagattgagttgatgctggaagaaaatctgccaatgatgatcttggctgaccagcaaaagatttcatatcatactatcaataattttagatcaagcagccatgccaatgaactgattaaaaagagctttatctacttcactaacctgttagaagatgaaggcttaatcaatgaaggtgctgcttttatcgatggtactaagattgaagctgatgctaaccgctatacatttgtctggcgcaaagcggttgaaaagtatcatgaaaagctgaaaggccaggcagttgaactttatgatgaattgattactaaagaagtagtcaaagaaatggaaaaagaaaaagttcaaactagtcaggggctaaaggaattagctcaagaaactgaagcagaaattaacaagctgactaaagagattgagcaggaaaacaaagccattcctggcggttcacctcgaaaagccaagcgacgtggactaaaaaagattctgcaccggctaagaaaagattatgtgccaagaatgcaaaaatatgaagaagccgaagagatctttgccggacgcaacagttattccaaaacagatcatgacgccacctttatgcatatgaaggaagaccacatgaaaaatggtcaattaaagcctggctacaatattcaagcagtcacgaccgatcaatatgtagttgattatgccatctttcctaatccgacagatttcaaaactttggagccggttttggatcaaatgaccgtgttggacaagtttgacaaaatcgtcgccgatgctggctatggcagtgaatacaattattcgatgctggaggaaaaatatccagacaagaagtactttattccctacactatgtatgaaaaagaacagaccaaaaagtataagaatgatccaactaagctaatcaactggtactacaatgaaaaagatgattattacattgatcatcatggcgtcagattcaatttcaaatattacagccagcgcaaggatcgttctactggtcaggtccgtgattttaaggtttatgaggcagacgagttccagctaacgccagaattggaacaattggctaaaacagctagcggccgccagcgccaagttcgctataatcctaactggcaatatttaaaagaaaaagcaaaagaagttctccaaagcgaagaaggcagacacatctatggcatgagaaaatatgatgtagagccagttttcggacatttgaagaacgtatttggcatgcgcagaacgcacctgcgaggtaaagagaaggtcgaaaccgatatcggaattgcctttatgatgatgaatttgaacaaatattgtcaaagaaggtggctgaagggccgatttttattgttaaaaattttaaagagaacaaaaaaacgatcaagattcttaaaaaaggaaatcttgatcgtttttattcatctggaagctagttttttcccagacactttttttatgcaaaaattattgacaaatctttaatataatattactgtattaagtaaatagaacagtaatattattagtgaaaggataaaaatgtcagaaattttaagagtggatcaagtaactaagacttatggtaaaaaaggtgagaagcaataccaagctttaaaaggaattagctttgccattgaacaaggtgaattcgttggcattatgggtgcttctggttcaggaaagacaactttattgaatatcttgtcgacgttagataagccaactagtggacatgttttagtcaataagcaagacattactgcacttaagaacaatcaaatggcagattttcgcggaaaagaaattggctttatttttcaagatttcaacttgctagataatttgactaatcgcgagaatatagccttgccattatcgcttcaaggagtgaaggcaaaggatattgacggaaaagcaatggcgattgccaaaagattgggaatagaatctatcttggacaaatacccagctgaaatttctggtggtcaaaaacagcgtgttgcttcagctcgagcattggtccataatccggcaattttatatggtgatgaacctacaggagctttagattcacaatcagctacggaattattgaaaacaatggcagacttgaataagaatgatcaagtttcgattctgatggtaacgcatgatccttattcagcttcttacgctcaaagaattttgttcatcaaagatggaaaaatcggcaaagaaattaaaaaagaaaataagaccagagaagaattttatcaagatattattgctgaattaggtagacgttagagggaggtatagacgtgctttggaaattatcactaacagggctaaaaagtcgctttaaagattatgctgttttgttttcggggctaactctagctgctgcaatcttttatatgtttatgaccattgcaattaatccagcttttcttaagggttcaatggccattgccttttcaattacccagatggtctttatttttgggatagcgctattagctattattaccctagtctatattgtttacgcaaatagttttttgcttagtatgcgtaaaaaagattatggtacttatatgatcctaggagcgagaaatagtaaaattggccgtttaatttttacagagacggttgttattggtttactcgctactgcattaggaattttaattggtatcggcttgactcaagttgtttctcagttattaatctctcaactgggtttgcagctgcataaattcttaggcttttatttaccggctattttatggacagttgttttctttgtagttttatttttcttggctgcaatttggaatcggcacaaattggtaagtactagtgtaatcaagcttttgcatgaggatcaaaaaccagttaagttacgtaataaccgaatctggaaagcaactgaagtaattctaggccttgcccttctagccattggctactgggcaatgtgggattaccatcagttgcaaattaaatcggttgaaattggttttgtcactattttggctggttcatattttgtatttgattctgtatttactacagttatcaatgctttacggaaaaataaaaagtttaaatacagtaaactgcattcttttaccttaggtcagctaaaatttaggttaggtgattacaatagagttttaactgttatttccttgctttttgctctagcattaggtgcgatcactgttggattaaactttaataatatgacagagactgctcttcaggcaacatattatgatgctgtgttgtataaaagggatgctaaagttaatcaacaacttaaaaaagttgccgttagaaaacaaacgactttgaattataaggtcaatgggaaaaagaagtttcctgttctatatgttactgaccaagaaattgctaagaaaaaaatcaaattccaatctggtcgaaagaacggcgaccaaatgaattggaagacaaagacgattacagttgcaggtgtaaagaataaaaaacaagagatgaatttccaacttgctagtttaacaccttattctgattatgaggttaaagttgtaactccagctgaatatgtgaagattcctggaaaaaacaaacaagtaaccttgctattaatcaataactttagaagtaattttaataatattgaaaaattgcaaaagatgtcacttgaccagacagttactaaggatgcacaaggagtttatgtttctctgaataattctaaatctgctcaatatcgcttagtagcaagcgttgcgtcaggttttgaatttatgggcttcttcttaggcttagctttcttagctatgttagcttcaaccttaatgtttaaagtgctatcaggagcaaacagtgatcgtcctcgatatgaaatgttgtggaaggtcggatcaagacgtaagttattaaagagctcgattaaagcggagattggtaccttgttcgctttaccggctgtcttgggtgtgattgatgtattatttggactacaatttttcaaagggattttagctaatccatacgataaaatttggattccatttacgatctttttagtattgtatttgctttattacttaattacagtaaaactctatgaaggaattgtattgaaaaaataatggtacgaaaaaagatctgcaaaatgcagatctttttaactgtatttagattaattttatttattttgcttatttaaaattgaatgacgaacaccatagctaaagtaaatgattaagcctaaaataaaccaaataccagcataaaatttagcttggtagtcaagccctaagaagacaattaaagcagccatgaaacctaaagcaggtaaaactggataaaatggcatcttgaatgaaggatcatcaatgtcttttccttcacgtggacgcaacttataaatacctaaagaaacaaacataaaagcaattaaagtaccagctgaaaccaattgtgacaacatggagaaggggaaaaatgctccaagtaaaattgctacgattgttaatgtccataaagcattattaggtcgacgatctgcattcaacttgcccagccatttaggaagcatctcgtcacggccaaatgaatagatcaatcttgaaccggccatactcatcccaatcaaagcagtgaacatccctaaaacagcaatggtttggacaatgatggcaacaattggatgaccagcaaaccgtaaggctaaacccactggttcagcggaattagcatacttctgataaggcataattccaattaaaactaaactaactccgacaaataaagtaacagcaatagcaagtgagcctaaaatgctgcgaggcatagttttttgtggattaattgcctcagctgagttagcggcgattgaatcaaagccaatgtaagataagaaaatcattgaaacaccagcatagattccttgccagccaccgaatggaccgttagcagtcatcttgtatttcggtataaatggggtgaagttaacttttttaattgcaaaaacgccaacggcaataaagagtagaatggctaacacctttaatacaactaaggcattttcaacgcgagctgcccttgaaacaccatgaccaattaataaggcaactaacaagattgaaactaaagaaatgatatcaataataccaccgttattgccaaaggcgttagataatgacgcgggtagtttccaacctaatggtgcgattagagctctaaagttagcagaaagccccgaaccgacgaaagccaaagcaatgaaatattctgctagaagggcccatcctgctacccaaccccagaattctcctaaaactacgttgatccatgaataagctgatcctgcaaatggcattgcagcagccatttctgcataggcaaaagccactaaaccagcagcgattgctgctaaaataaaggaaatcgctactgcagggccggtatgcttagctgcaacttcaccaggtagagtgaaaattgaagcggagacgattgttccaacacctagagctaagaagtcctttacttttaatgagcgcaccaggtgtccatctttattttcatagacgcgtggatcttctttactgttcattctctgccaaagattcacaacgcaacttcctccttatgttaaaatatattcatctaattataattaaaagtacgttaaaaaatcaactattacatatttgaaattccactttttttagaaattgttatctaagataggttaatctagcactagcttatgacctttgttatactaaagactggtgaaaatcaatggatgaactaactaaaaacgaggagctaggcgatttatatgcctactatggctctttattaacccaggggcaacaatcttattttgaagactattactacaatgatttgtctctaggcgaaatagctgctaatcatcaagtatctcgtcaggctgtctatgataatctcaagcgctcaagtaaaattcttcagaactatgaagagaaattgcatatgaagcgcgacaacaatcaggttgaagatgtcttggcagatacgcttttatctttagataatggtgatagtgaagctgctaaaaaagaaataaccaatttattaaatcaattgaggggagaatagcccatggcttttgaaaatttaagtgaaagaattcaaaaagcattaaaaaatttaactggcaaaggtaaggtctcagaagaagatattaataaggctagtcgtgaaattcgacttgctttgttagaagccgacgttaactttaaggtcgttaaggactttattaaaaccattaagaaagaagcccttggcaaggaagttcaggaaagtttaaacccaggtcaacaagtaattaagatcgttaatgaacagttaacgaagatgatgggtgaagaagcagttcctttaaacaagtctaagcatattccaactatcattatgatggttggtttgcagggaactggtaagactacgactgtgggtaaattagcctatcatttgcaaaagaccgaaaaggcccgtccgctgttgatagctggcgatatttatcgtccggctgctgttgatcaattgaaacaaattggtgatcagttaaaagttccagtatatagtgaagacggagaaaaagacgtagctaaaattgttcaagatggacttgcagaggctgaaaagaacaagaatgactatgttttgatcgatacagctggtcgtttagaaatcgatgaacctttaatggaagaattagagcgggtaaagaaagtaacccatcctgataacattcttttagtcgttgatgccatgactggtcaggcggcaacagatgtagccaaaggctttgacgaacgccttgatgttacgggcgtgattttgactaagttagatggtgatactcgtggtggtgcagctctttcaattcgtgcggtaactggtaagccgatcttatttactggtcaaggtgaaaaattaagcgatttagatgttttccatccagatagaatggcatccagaattttaggtatgggtgacatgctttccttaattgaaaaagcccaacaagattatgatgctaaggaagctgaaaaagtcgctgaaaagatgcgggaaaatacttttgacttcaatgattttgttgatcaattgcaacaagttcaaaaaatggggcctcttgaccaaatcatgaagatgattccgggactatctaataatccgcaattaaagaatctaaatgttgatcaaaagcaaattgatcatactgaagcaattgtttattcaatgactcctgaggaacgagaaaatcctgatatgcttaatccaagccgtcgccgaagaatagctgctggttcaggtcgtcctgtagttgaagtcaataggatgattaagcagtttaagcaaatgcgcgacatgatgagtaaaatgtctaaaggaaatatgaagggcttgagcaatttgcctggaatggattcgccaatggctaagatggcaatgcgccgaatgaacaagaatttcaagaaaaataagaagaagcgtttacgcaaggtaaaaagattccattcttaaaaaataaactgttaaggaaaaatactttacacctgttaagtttggtggtatattattaatcgttaagttttaggaggaaattaatttatgtcagttaaaattcgtatgcaccgtgctggtgccaagagaaagccattttacagaatcgttgttgcagactcacgtatgccacgtgatggtcgcttcatcgaacaagttggttactacaacccagtttcacaaccaaaggaattgaagcttgacgaagacaagatctttgaatggttacaaaaaggtgcacaaccttcagacactgttagatcacttctttcaggtgctggcttgatggctaagttgcacgatgcaaaatacaataagtaattttgctattaattaagagcttgatgccgtgtgcttcaagctttttttatacctaaaggagaaaaaatggaatattacgatgttgctcggattttaactacgcacggtttgaatggtgaagttaaagttagtataattactgatttccctgaagatcgttttgctatagggatgcatttggcaatcaaaggtgaaacttctcaagttttaactgtggccaagagtagaccttttaagcaattttggttagttcaatttgcagagattactgatattgatcaagctgaaaaattaaaaggaaaaatactagttgttagtgaagccgaccgcggtgaactacctgaaggcgtttattattataaggacatctttgactgtgatgtcattgatgaagaatccggtaagcgcttgggtaaaatcactgatattgaatcgcctggtgctaatgatatttggctagtccatgaagataatggtaaagagtattggattcctaatattgcatcggtggttaaaaaagtagatgtagctaataaaaaagtctatgttgagttattggagggcttacgcgatgaagattaatgtattgacactttttcctgatatgtttgctcctttgcaagtttcaatgttgggacgtgggcttgaagataaaaaatgggagcttaatttagttaattttcgtaatttcactaccgatgtacatcatcatgttgatgatacgccctatggtggtggcgctgggatggttttgcaaattatgccgattaaaaaagcacttgactcgttaccatccacaggtaaggtaattattactgcaccacaaggtaaaacttttaatgaaaaaatagcgcaaagctgggccaaagaagatgaattaacctttatttgcggacattacgagggctttgatcagcgggtttatgacttggctgacgaaactgtttcaatcggtgattatgttttaactggtggtgaattgccaacaatgagtatgattgatgctacagtaagacttttacctggtattttgggcaatgcagctagtccagttgaagaaagcttttcacatgggttgttagaatatccgcaatatacgcgtccagcagattttgaagggcaaaaggtgccagagatattgactagtggcaatcatcaaaaaattgcacaatggcggcataaagaggctcttagaacaacatatttgcatcgacctgatttgctcaaagaacgagttttaacaactgaagaaaagaaaatgttggcagatattaaagcagagcttgattaagcaagctctacttgatatactattcatcgtggcgtgaccacaatgaataagtttaggggtgttccgctggcgttggtacgttgatgaatgccgaagaaggagaaaagtatattatggatccattaattcaagaattaactaaagaacaacttcgtgacgatattcctgcattccgtgcaggtgacactgttactgttcatgtacgtgttgttgaaggtactcacgaacgtattcagttgttcgaaggcgttgtaatcaagaagaagggtactggcatcggtgctacttacacagttcgtaagattgcttcaggtgttggtgttgaaagaaccttcccagttaacgacccacgtgttgctaaggttgaagttaagcgtcatggtcgtgtacgtcgtgctaagctttactacttacgtgaacgtcacggcaagtcagcaagaattgctgaagcacgtcgttaatcataacgtcaatcataaaaaaggtcagttccagtggaactggctttttttctacccaaaagttgtatataaaatgctatgatggagttatggaatgaatgaggtgaaataaatgaagttcaattgcaaatttgcacttgtggcagcaaccgtattgacagtagcacctatattatcttttcccaatatcacgactacggtacaagcaacgacgaagaaagcccaagcagctaagaatacaatccaggtaaataaagcaccaataatttatgatcgtgcaggtaattataattcgaaatatcatcaaaatatcaaagctggtactcatttaaaatatagtggcaagacttatattattcagcagcgctttgcagctgggattcctgtgccaactagtcgaattattggtggtaagctttactattcgattggtaaaggaggctatgttaaagaaagcgatgtgttaacctggcttggtaacacaaatacggtcaagttacattttcggcacaagaaaaattatatttatgataaaaatggtaaaaaattagttagctataatggtggcaagaattattttactaataaacaaaaaccaaaaattgaggtaccatactataattcgcctaagcaattatttaatattggtaagggcggttatattgatgccagccaagtaactactttgaatggcaagggaaccgtgtttttaaataataatgcacctatttatgatgcaacaggcaagcaattcaagaataaaaatctaaagcaaggcacggttttaaactattatggtaaacctaagaaagcggctgctaatactcaattttattattatcaaaataaaactaagatgactttacctgcaattcaacaaggtgatcatacttattttcagattagtaaaacacaatatatcaatgcggcagacgttgctttagtagatggtaagacgttgtgggataaaggacctgtgagtgtttctttaataaatgatgcatatgcgtatactgccaaatttaagcaaaataaaaaggtgctttatcgtgctggcgctaaactaacggttgatagaaccaaaatagaaggtgaaaaatcacctcaactttatttacatgttaaaggtaccaaaaactatctttatttgggtaatgaaaaagactatggcgcatcaccattagattatcgtcacggttcaactaatttaatattgcagacactgttgcataattagtctgtgtgtaatacttttaaactgatatcataaaggactattatcttaatagaaggtgatagccttttattttaaaaagatcacaatgataaaatggctgtatagtagtaatgatgaaaaaagattgtgaagaaattcaaccgtgaaacggttgtgaaactaagacaaaaatcacaaagctggcagatatctattactaatcttgatataaaggcatttgttattgtgaagctatttttgtaaaaaataatattaaatgtggaattagcgttagaaataatagttatccacatttgtaaatgtccccagtaaagtcgagtaaaacaaaaatttaaaagaagatggaaaaatggattatccgaaaaaactgattgacgaagtgaaagaacgatctaaaggcatgcagctagaaggaattaattctggctcgggtccccaacatcctttattaatgattgtcggtgaagctcctggtcgaaatgaaattgttaataatattccctttagcggggatgcgggtaaggaattggataaatcattgaagcagattggtctgacacgtgatcaggtatatattacatctgctgtgagaagtcgaccttttgcaatcaaaaaggtttttagcaagcgtgaaaataaagaagtaatcaaatatcccaatcgtaagccaaccaaaaaagagattctagctcatgcgcatttcttagattttgaaattgactatgctcaaccaaaactaattgttgccttgggtaatacgggattagaacgtcttttggggtctggtcataagatttcagctgaacatggtcaagtaattaaaaatacaccaattttacgtttaaatgaaactaaagacggctatatttggtcaaaagaaagatacactattttcccagaatatcatcctgccgctgttttttataatcgcaagctaacagatgatattattaaagattgggataaaatcaagccgtatgtagaaaaggaaaaatctgaaaatgagtaatgaaacttttttgattccaattagacaaaataatgatttatcggatatcgctttaaatgaattacgcatggatctagatgagcatgctttacatcaacgttattacactgatattgcttatttagcaggaaatagtcgtaagtatagtctaaatagtgtacaaaccgttgcgagtcctttgataggtaagaaaattttatttttgggttcttctgttacttttggttttggcgctttgggtgaaagctttgttgattatctttggaagcgtgatggcgttgctgcaattaaagatgcagaaaatggtacgaccttagttgatgaagatacttataagccaaacgattcttatgttgctcgttttagagaagagctgaccgaatcacaacctgatgtttttgtcttacaactttcaactaatgatgcaaatcaaaataaaaaactaggcaaaattactaatcaaaactttgacaccaaaaccattacgggagctttggaatatatgatttcaacggctcaagcaaggtggaaatgtccaattttaatttatactaatccttattttgctaatccgttatacaaacagatggttgaacgagtacacgaactggctcaaaagtgtcacgttgagattctagatttatacgatcatcctgattttcagcatcaagacgctttgtatatggctgatgaaattcatccaactcgtgcgggttatctaaagaaatggttaccattatttgaagaaaaaataactgaaattttggcataaagaaagacctagataaattatctaggtcaaaattgaaattagtcaatgttattacgatacaagctaactaccttacccaaaattgtaactttaggtaaaatgattggagccattgtatcattttctggctgtaatcggtagtgatccttttctttgtagaaacgcttaactgtagcttcattttcttcagtcattgccaccacgatttcaccattgttggcagatgattgtttgcgtacgattacgctatcaccgtttaaaatgccagcgttaatcatactttcaccgtggactttgagcataaagagttcaccagcatcactttttaagtctggtgggagtggaaagtagtcatcaatatcttcaactgccagaattggttgtcctgcagtaaccacaccgataactggaatttcctttggcttgatacctaactcttttttaccttcacgggtaatttccaaagcacgaggttttgtagcgtcttttactagccagccctttctttcaaggcgagctaaatgaccatggacagtggaagtagaagaaagaccaactgcagaacagatttctctaactgtaggtggaatgctccgtttctcaactgtatcgtaaatatattgcaaaatttctagttgctttttatcgcttgtttttcttggcatttttaattctccgtttgtatttatggtacttaatattataacctaattctaccagataatgtcaatattatcaaacaggcgttcttaagaagttatactttttttatgacataaaatagggtagactaatgagtgttaatgtgaggtggaattattatggataataaagatgcaatgagcaaagaagaagaaaaaaaggtaactgatcgaatcaacgaactttaccataagaaagaaaaggaaggcttaactccagaggaagaagctgaaagaaaagaactacataagaaatttttagctaactttagagctgcctttaagcaagatgttgaaaacatggtcatcttagacaagaatggcaaggaagttacctcagaacgtgccaagcgagcacaaagaagaaaaggacttagaaaagattaattagttctttcaaaaagttagagaactatgataagatataaatgttagttagatggaggatttaatatgaatttaggtttagcaatttttttaattatcattgcgctcttgattggcgctgtagcaggtttttacggtgcaagagcttacatgaagaagtactttaaggaaaatcctcctattagtgaagatatgatcgttgctatgatgtcccaaatgggtcaaaagccttcaaataagaaggtacatcaagtaatgaacatgatgaagcaccaacaaaagtaattaatttaattagttttgttagaaaaggcgaaggatttccttcgtcttttttgtgcacttttaagaatgaggtgaaatatgggaatatttagtaagttagggtggttttttaaggctgagaaaaaacgttatatcataggcattacctttttggcgttaacttctttagctaacttggtaccgccccgtgtattaggcttaatggccgatcaattggatcaaggtcacatctcttggggacaatatggaatgttgatcattgctgtcgtggccgctgcattcacactttatattttgcgctatttttggcgtaaacaaatttggggcggcgcagcagaattagagcgccaaatgcgttcaaagttatttgatcattttatggtgatggatcggactttttatcagcgtcatcgaaccggagatttaatggctcatgctactaatgacgtttctgccattcagaacgttgctggtgatggcgttttaacattggttgattctttagttatgggactttcaacaatgattgccatgatcatttttgttgattggcgtttaactattgtagctttattaccattaccgtttttggcattgggagcttggaaattaggtgatcacttacatgatgcttttgataagtcacaggctgcattctctaagctgaataataaaactcaggaatctgtatctgggattaaggtgctcaaaacttttggtcaagggaaagaagatactgctgcttttgacaagatggtcgatgaaacgatcaatattaataaaaaagtttttgtctgggattccttatttgatccactgggaacaataattatcggtactacgtatgtgatcacgattatttatgggggactattagtaactaacaagattttatcaattggccagttggtttcttttatcgcgtatatttctaacatggtttggccaatgtttgctattggttatttgtttaatattctagagcgtggtagtgcaagttatgaccgtgtagaaaagttacttgatgaaaggcctttgattactgatgcacatgcagatccaaatattacttctcaagatttgcaaggtgaattaaaatatgacattaaatcatttgcatatccagatgagccagatattccagttttaaagcaagtcaatttcactttaaaacctgggcaaactttagggttagttggtcgagttggtgcgggtaaaaccacaattattcaactgcttttgcgagaatttgatcagtatgatggtcaaattactctgaatggaaaagatattagaaatattcaactaaaggtattactcagtcagatctcctacgttcctcaaaataatttcttgttttcaactagtatcggcaaaaatattgctttctcttctgaaaatgtagataaggatgatattgcagctgcagccaagaagagtgatttgcatgatgatgttttgcaaatgcctaaaggctatgaaactttagttggcgaaaatggcttatctctttctggtggtcaaagacagagaatgtcaattgctcgggcattgctaaaagatagtcagattttgattttagatgatgcattgtcagcagttgacgcaaagaccgaaactgagattttgtcatcattaagaaaagagagagctgataaaactacaatgatcgcggctcaccgtttgacttccgtgatggatgctgatttgattttggttctaaaggatggtcaaatcgttgaacgtggtaatcatcaacaactattagctgcagatggatggtatgcggaaatgtggcgtagacaggaattacaagcgaaagtaggtgaagatacagatgaataataacgaagaacagcatgaatctgtttggtctaaggcgataccatttaaagagcaagttgatatttttaagcgtttaatgggctttgttaagcaatttaaatttgaaatgattgttgctttagttggtgcatttattgttagtgtaattaatattcttttgccacgtggcttgcaatatttcttagatcactttctattgcatcaaagcacaacagtgcaggtgattttgtttgcaggttttctttatgctttaggctcaattttaaaggcaataattcagtttacttaccaatatttctttgctttaggatcagaaaaaacgctagagagtgtcagaagggcattgtaccgcaaactgcataagctagggatgcgctattttgatcaaactcctgcgggctcaattgtttctagagttactaatgatacgatgactttgagtaattttttgacggtgctatcaacttttgtgattggtgctttttcggtgattactgcgttagtagcgatgtttactactaatatagttgctgggtggttgattttactctttattccgattttattattagttgtttggctttattcgcaaaaaagctcacgtctttatcgtaattatcgtgagcgtcttagtcgaattaacgctaacttaaatgaatcaattgaaggagtatcggttatccaagaatttaatcaagaaaaacggatgactaataattttgaaggcgaaaatggtggtttaatgaatacacgcttcaacatgatccgagtaaattcattgttattatcgccattgacatcgctgctttattcgttagctttagccatttcattaatgtactttggttttccattacgtgaaacttttgttccagctggtgtagtctatgccttttcacaatacatttcgcaactttttaatcctatttcaactgtgatggatcaaatgacctttttccaagatgggattgttgcaggaaagcggatttttcggattcttgatgatacccaatatgaaccacagcaggatgctcaaaaaggattgacgattactaaaggaaaaattgagtttaaacatgtaagcttttcttatgatggcaagcatgaaattttacatgatatttctttcgtagttaatccaggtgaaactttaggaattgttggtcatactgggtcagggaagagctcgattattaacgtgatgatgcgtttttacgaattcggtcaaggtgaaatcttgattgatgacgttaatattcgtaaatatcctaaagaagaattaagaaaaaaacttggcttggtattgcaagaaccgtttatgttttatggagatatttcatctaacattcgtttgtataataatcaaattactgataatcagattaaagacgccgctaaggcagtccaagcggatcgctttattgaaagaatgccgggtaagtatcatgctaaagtgattgaaggcggagaagaatttagtcagggacaaagacagttaatttctttcgctcgaactttagtcacagatcctaagattttggttttagatgaggcaacagcaaatgttgataccgagactgaaactttgattcagcaaggactaaagcggctgagaaagggtcgaacgacattagctattgctcaccgtctttctacgattgccgatgcggatcaaattattgttttagacaagggacgcataattgaacggggtacgcatgatcaattgcttgcacaaaagggttattactataatttgtataccttgcaaaataatgaaaataaaaactaattgtttttcaggacgtttgtgtagtagcaacgtctttttttgatataatagttaaaaagtattaaataattatgaatatttataaggagcaaaaatgaaaagatattttacagttcgtggtggagctggcgacgtttctaagccagacttaaatgctaagccacaagataacttatacttggctgttaactcagaatggctatctaaagcagaaattcctgctgataagacatctgctggtgtcaattcagagcttgaccaaaaaatcgaagatcgagtaatgaaagactttgcggacattgcggcgggcaaagaaaagatgcctgagattaaagactttgataaggcagttattttgtataagattgcaaaagattttgctaagagggatgcagaaaaagctaatcctattcaaaaggatttacaaaaattaatatccttaaataattttaatgattttaaacaaaaagctgccgatttgtttatgggaccatatgctttaccgtttgtatttgacgtcgatgccgatatgaagaacactgatgtaaacgtactccattttggtggcccaagcacattcttaccagatactacgacgtatcaaactgctgatgctaagcaacttttggatactcttcaagaccaaagtattaacttactgacaatgtccggtattggtaaaagcgaagcacgagtttatgttgaaagcgctttggcctttgatcaaaaattagctaaggtagttaagtcaactgaggaatggtcagattatgccgcaatttataatccagtaacatatgctgactttattaaaaaatttaaatcatttgacatggctgatttcatggattctattttaccggttaagccagatcgaattatcgttatggaaccacgttttctcaatcatgctgaagaattattgaatgaagggaattttgctgagattaaaggatggatgctagttaaatacattaacagcgtagctaaattattgtcacaagattttcgtgaagctgcgtttccttttggtcaagcagttactggtacgccacaattgccatcacaaattaagcaagcttatcgtttggctaatggtgcttttgatgaagtagttggtatcttttatggacaaaaatattttggggcaaaagccaaaaaagatgttgaagacatgatccaacggatgcttaaggtatatgaagaaagaattaatgctaataaatggctttctgctgaaaccaaaaagaaagctgtgattaagttaaaggcgttggttttaaaaattggttacccagacaagatcgaagaaatctttgacttattacaagttgatccgaaaaagagcttgtatgaaaatgaagcggcaatgtcaactgtacgaacgaaatatatgcttaataagttaactaagccagttgaccgttcagtttggctaatgccaggtaatttgaataatgcgtgctatgatccgcaaagaaatgacttaacctttccagctggaattttacaggcaccattttatgacattaatcaatctcgtggtgcaaattatggtggaattggtgcaactattgggcatgaagtatcacatgcatttgataatagtggagcaaaattcgacgaacatggaaatatgaacaattggtggactgacaaagattttgctgagtttaataaacgagttggtcaaatggttgatatttttgatggcttacaatatggtcctgctaagattaatggtaagcaggttgttggtgaaaatattgctgatctagctggccttgcttgtgtagttcaaactggggaaaatgatggggcggatttgaaagatttgtttgagaattatgctcgtagctggatgcagaaacaacgccctgaggcaattaagactgaagttcaaacggatgtccatgcgccacaaccaacgagagtaaacattccggttcaatgtcaaaatgcattctatgatgtatttaacgttaagccaactgatggcatgtggcttgatccagaagaacggattactatttggtaaaattgaataaaaaaatagtcactggatttcaatttctagtgactatttttgatatgtaattatttatcaagcatatatttacgagtcatcggtaaagttttacctgatggtccctttgtcaataggtattggataacgtcgatgttaccagactcgaaactagcagcacaagcattaaggtacatatcccacattctacagaatctttcaccaaatttcttttctacttcaggacgaacggcattaaagttcttatcccaaatttccaaggttctttgataatgacgacgaagagtttccatatcagtaatttgtaggcctgaatcgatgatgtcagtaacaatttctggtaagcctggtaagtagccaccagggaaaatatacttgtttaaccaagcattagtggcaccaccttgttgacgggtaataccatggattaatgcaacaccgtctttgttaaggtacttgtagacatcagcaaagtatttaggtaagttttctttaccaacatgttcaaacattcccactgaagtaatgtaatcccatttttgatcaccaagttcacggtggtcttgtaatctaacttttgcgacatcttgtaagttatcgtcgtagattcgcttttgaactaatttaaattgctcctcacttaaggtaacaccggtgacttttaaaccgtattccttagctgcagtaagcatcagagttccccagccacatccgatatcaagtagggtcttgcctttttgtgggtggagtttgtttaagatatgatgtacttttgcaatttgagcttgttcaagatcatctttattgccatcttcgaagtgggcgcaggaataggtcattgttgggtcaagccacatcttgtagaaatcattaccaatgtcgtagtggctttgaatatcttcttcgctttgcttttccgtgtgtttttgcttaggcataaacttacggaacttagaagcacgcatgaatgaatcagcactttcataagcaccaacaagcaatttttggatattaccatgaatttcgatttttttatccatgaatccttcgcccaaagctagagaagcatttcgagtgatttcactcattggaatcttttcattaaaaacaatttcaatttcaggatcaccattgccataaacttcgctcttaccgtcccagtaggttaccttaacagaaaaggggaaagatttactaagcatcattttgtaaaaagttttttctaacaattgctttttcctccaatatttaaaacctaaaaattattttaacacttatattaaattgcacaggtaaagaaaaatcagtataaagcaatatttgttttatactgatttttacttatttagcaacgtagtggaaatttggatccatttccttatctaatttgttccaagcatcttcaagttgttgaaataaaatttgttcattttcatgggttagtttagttttacgatcaatggtaattggatcaccaaagttaacttctaatggcttgcgcttaagcagtcctttaaaagttaaagggccttggtagacaacaggtaccattggtttttttgacattttggaaattaataaaactccaccttttaattcagctgaatgtcgcgtgcctgaaggaaagataattaatgataactttccttctctaagtcccttaactggaatctttaaggctgatggtccagggttatttcgatcgactgggaaagcgtgagcatgatcaagaataaatcgtaaaaccggatttttgaataattcaattttagccataaacatgaattccattggactagcacctagtgcaaaaagcagtggttcccaccatgtacggtggggggctactaaaatataattgccctgaggcaagcgatccttatgatgaatgtgtagatgaccgtttaacacccaaacgatgaaacggacaatcggacgtataattttgtaaaacattgtctcctcattgattccttcatttgatgtaagctattataaaaatataatgacgagaaaggcaaatatttttatggtagatctgaaagataatgagcgaattgactacatgtatagcgataatcttcgtattattcaagataaaacggcttttagtttttcaatggatacattatttttagcatattgggctaaagacttgatccgtgataaagataaggttgctgatttatgtgcaggaaattgtgcagctacaatctatatggcttattttaatcgtgcccattatgatgcaattgaaattcaaaacgaagtttattctcaagcagttcgttcagtcaagcttaatgagatggaaaatcgtatttcagtttttcaggataatgtgctaaatgcaggacattttttgcggaaagatagttatgatgtagtaacagttaatccaccatattttaaagcacctaagggacatgaagttaatccagatcgtaaaaaagcaattgctcgccatgaacttttgattaatttagagcaaataattgaagtggctagtggcttacttaaaatgaaaggcaaaatgttaatggtacatcggccagagcgcttaggtgagattgcttattattgtatgaagcatgacttaagcatcaaaatggtgcagccatttgtgccacatcgcggtgaagatgctaatttaattattgtagaagccgtcaagcatactggaactgatggaactgttttgaaagatgctgttgaagttcatgaatcaaatggcgacttcactccattagtacagcgaatctcacgagaaactgcagatgacaaagctaaacatgaagcacagggtaaatattacttttatgtcttactgtgtaatgatggcagtttttatggtggttttactaatgatttagaacatcgtttgaaaatgcacaatttaggaaaaggagctaagtatactaaaacacggcgtcctgtacggatgatttatcatgaacagtttgacgataagcgtttagctttgaaacgagaatattggtttaaacatcattcacgtgcttggaagaaaaaatttttgcatgagcataatataaagttttaatccttgcatactgtaatcttttcttgtagaatatttgagtatgctgtgtcagcatatgaaacttaaaacacatcaagagcaatcatcatcgtggtgcccagggtagtggttagatgatgaaatgaacgcttgagaggatataaaaccataggaggaatttaaatatggcagacgttgttacaatgaagcaattgcttgaagctggtgtccactttggtcaccaaactagaagatggaacccaaagatggctccttacattttcactcaaagaaatggtatctacatcattgatttgcaaaagactatcaagatgttagatgatgcttacaactttatgaaggctgttgcccaagacggtggcgttttcttatttgtaggtactaagaagcaagctcaagattcaattgctgaagaagcaactcgtgcaggtcaatactacgtaaaccaacgttggttgggtggtactttgactaactggtcaactatgcaaagccgtattaagagattaaagcaattaaagcaaatgtcagaagatggtacttttgatgttcttccaaagaaggaagttgctctcttaactaaggaaatggacaagcttgaaaaattctttggtggtattgaagatatgccaagaattccagatgtattgttcgtagtagaccctaagaaagaaaagattgctgttcacgaagctaacattttgggtatcccagttgtagctatggttgataccaacactgatccagacccaatcgacgtagttattccatcaaacgatgacgctattcgtgctattcgtttgattgctggtgctatggctgatgctgttgttgaaggtcaacaaggtcaagatgatgaatcagttgaagttgacttcaaggaaaatgcagacggttcagaagaaatcgttagcgctgaagaaaacccagaagactagattttactattagttccgtaggaggatctattaatggcacaaattactgcaaaattagttaaagaattacgtgaacgtactggtgctggcgttatggacgctaagaaggcattagtagaagttgacggtgacatggataaggctgttcaataccttcgtgataaaggtatggctaaggcagctaagaaggctgaccgtgttgcagctgaaggtttaactggcgtttacgttaatggtaatgtggcagctattactgaagttaactcagaaactgactttgtttctcaaaacgacaagtttgttaacttggtaaatgaagctactaagactattgctgaaggtaagccagctgatatggaagcagctaaggaattgaagatggctgatggtactactttagaccaatcattcgttaacgcaactgctacaattggtgaaaagattgttttacgtcgttttgctttagaagaaaagaatgacgaccaagaatttggtgcttaccaacacaatggtggccaaattggtgttatcactgttttagaaggtgcagatgctgcaactgctaagcacttggctatgcacatcgctgctatgagccctaaggttatttcaccagacgaattagatgatcaatttatcactgatcaattagctgtgatgaaccacaagattgaccaagacaatgaaagtcgtgcattggtacataagaaaccattacctcaccttgtttacggttcagctaagcaattaactgatgatgttttggctaaggctaaggaagacatcaaggctgaacttaaagaagaaggtaagccagaaaagatttgggacagaattattcctggtaagatgcaacgctttattgatgataatactcaagttgacaagcaatttgcagtgttatcacaagactacattatggacgatagcaagactgttggcgaatttttgaaggaaaaaggcgctaagttagttgctttccaacgttacgaagttggcgaaggtatcgaaaagaagcaagaagacttcgctgctgaagttcgtgaacaaatgaagtagtcattattacataattatcatagaaaggaggagtacaccgtgtgctccttctttttttgtaaaaattttgtagtgttttaagtgttaaaagacattgcggcattagatatggtagaataattaaagctattagaggaggtcattatgagtcaagttaaatataaacgtgtcattttaaaaatatcaggtgaagctttagcaggtgacaagggtacggggattaatcctactgtaattggtcacttagctaaagaaatcaaatcagttcatgatttaggtgttgaaattggtatcgtctgtggtggcggtaacatgtggcgtggtgaaactggcgctaagttgggtatggaacgtgctcaagcagattacatgggtatgttagcaactatcatgaatggtttagctttgcaagatggtcttgaaaaaataggtgttcctactagaatgcaaacttcaattgaaatgagacagattgcggagccttacattagaagaagagctttgcgtcaccttgaaaagggtcgtgtagtcatttttggtggtggtactggtaatccatacttctcaactgatactactgcagcccttcgtgcagctgaaattggtgctgatgtaattttgatggctaaaaacggtgttgacggtgtttactcagctgatccaaagactgatccttcagcaactaagttctcagaattaactcaacttgatttaatttcaaaagacttgaaggtcatggatagaactgcaagttcactttcaatggatactgaaattccattaattgtctttaacgttaatactccaggcaatatcaagaaggttgtattgggtgaaaatattggtactgttattagaggtgataaataatgaataacgaaactattgaaaaagcaaaaactaaaatgacggattctattaaggtttatcaaaagagattagcttctatccgtgcaggtgttgctaacgctgctcttcttgataatgtccaagtagaatactatggggcaccaactccattgactcaaatgtctagtattaccattcctgaaccacgtgtattgcttattactccatatgatcaaaattcattagatgatattgaacatgcattgttggcttcaaacttaggattaactccggcaaatgatggtaaggtaattagattagtaatccctcaactcactggtgaaagaagagaagaaattgccaaagaagttggaaaatttgcggaagaagctaaaattgctgtgagaaatgttcgccgtgatgccatgaatactttgaaaaaagatgaaaagaatggtgatattactgaagacgaacaacgtaacttagaaaagcaagtacaaaaagtaactgatgatgctgctaagcagattgaccaacttgctgatgaaaagcgtaaggaaattactcaaggttaaagatgagtaataaggataatgaattaaatcatttagccattattatggatggtaatggacgttgggcaaaaaagaggcatagacctcgttttgttggccatcgagagggaatggataatgttgagcggattactttagctgctgataaattaggaattaaagttttgacactttatgctttttctactgagaattgggctcgtcctaaagaagaagtagcttacttaatgaacctccctgttcgcttttttgataaatacatgccaacattgatggaaaataatgttaaggtaaatatcatgggctatttggatgaattgcctgaaaagacttatcgcattgttcaacgtgcaatgtcagagacggccaataatacaggcttaattctgaattttgcttttaactacgggtcaagaagagaaattacgtctgctatgcaggagctcggtggaatgattgaagctggttcactaaaaagcgaagaaattactgaaaaaatgatttcagaccatttgatgactaaaaactttggtccatatcaagatccggatttattaattagaacgtccggtgaacagcgaatttctaatttcttattatggcaattagcatattcagaacttgcctttagcgaaaaaaattggccagattttgatgaaaatgatttaaaaaaatttgtagaagattataagcaccgtaaccggcgctttggtaaagtagacgaatcggatagttaaatatgaaacaacgtacaattacggcaattattgccttatgtctttttattccaattgtgctcgcaggtggcctttggatggattggctgactgtattattcgcagcagttggcattagcgaaatctttttaatgaagaaacaaatcttagtttcttttaattttttgttagccttacttgcaactttaacctggacagttccagactcattctttaaagtatttccttcaaatatcactaaattaggtgtgttttatggaattattatgttgttcttgacctggactgttctttcaaagaataaaaccacttttgatgatgtaggtgtatatattttggctgcactttacattggaataggttttcactatatggcagccattagagcatacccacaaaacggtttagcattgctgggttgtgtttttgttgttgtttggtccactgatatcggtgcctacatgattggacgtaagattggaaaacataaattatggccagttattagtcctaataaaacatgggagggctcgatcggtgcagttgtttgtgccttaatttgtagtgccatctatatggcaattcttggcagcttgggtattaactttggtgtatctgaattaacgatgattattctggcctttttcttatcaattgttggtcaaatgggtgatttagttgaatcagcttacaagcgtttctatggtgtgaaagattccggaaagattttgccgggtcatggtggtatcctggatcgctttgatagtatgctgtttgtattgccagtagtggctacaattttaggtattgttcattaggagaattttttattgaagggtatactaatctttatcgtcgtctttggtatattggtatttgtccatgaatttgggcattttatcgtagccaaaaagtcaggtattttggttagagaattctcaattggaatgggtccaaagctttttcaaattagacgtaaccccaccacttataccattcgttggttaccacttggtgggtatgttcgtttagcaggcgctgacgatgaaagcaagctggatcctggtatgacggttgttttacaattgaatgaacaaaatgaagtagtgagaattgatgcttcagaaagcgaaataccaattgaaggaattcccgttcaagtaacaaaggctgatctagtagacgatttaataattaagggttacgaaaatggcgatgaaaatgatccagtaacttatcacgtagctcatgatgcaactattattgaaaaaaacggaactgaattaattattgcgcctcgagatacacaatttaatcaagctaatgtttggcaaaagttggcaactaattttgctggaccttttatgaacattcttcttgggtttgtagtatttttaatctggacatttacagttccaggtccagcaacaactacagttggatcaactcaggctaattcaccagcgcgtgatgcaaaaattgtgactggtgatcagattgtggcaattaatggacaaaagattaataattttgatcaagtgtcacagcagattaatcaaagtaaaggcaaggtcttacactttgaattaaagaaaaatggtcaaattaggaaagttacagttaagccaaaagctcataaaattcaaaaacaaacagtttatcaaattggtattgtagctaagagcaatgagaatgcagttgttaaattaaaacgtggctgggatacagctatttcaactaccggtctgattttcagagccgtaggtaacttatttagccactttagtttgaataaattatcaggtccagttggaatttattctcaaacttcacaagtttcacaaatgggctttacttatgtattagcctttttaggaatgatttcgattaatttgggaattgtcaatttaattccaattcctgggcttgatggtggtaaacttttattgaacttaattgaattagttcgcggtaaaccgatttctgaagaacatgaggcaattgttgaattaattggtttcggcttattattagttttaattattgcagttacaggtaacgatatctatcgctattttattaaataattatattttttactttaggagataagaatgcgtcaatcaaaattttttatgccaactttgaaggaagcaccatcagatgcagtggctgaaagtcataagctgatgattagaggtgggtatattcgtcaagtcacagctggagtttatgcttatcttccattaggctaccgtgttttacgcaaggctgagggaatcattgaacaagaaatggataaaattaatgttccagaaatgattatgcctcatttacttcctgcaactttgtggcaagaaagtggccgttacaagaaatatggtgcagaaatgttcaagttaaaagatcgtcatggacgtgaaagcttgcttggacctacacatgaagaaacttttaccgaaattattgctaagaacttaaagagttacaaacaaatgccacttgctttgtatcaaattcagactaagtttcgtgatgagaatagacctcgttttggccttcttcgtgggcgtgaatttgtaatgcttgatggttacagttttgctgcaactcgtgatcaattggatgaacaatttgatgatcaaaaaaatgcatataagcgtatctttaaacgtgccggtgttactgttcaccctgtaattgctgactcaggtacaatgggaggtaaaaactctactgaatttcaagcccctgctgctatcggtgaggatacaattgctactaatgaaaaaggaacatatgctgccaaccttgaaatggctaagagtattgatactttcaagcaagaaccagaagatgctaagcaattaactaaggtagctacgccaggctgcgatacaattgaaaaattagctaaattcctcgatgtaccagctactagaattgttaaaagtattttatacattgctgatgaccaaaaagttttagtattaatccgtggtgacaagcaaattaatgaggttaagttgggtcatatccttgacgctgatgaggttcatgaagcaaatactgctgatttaaaggaaatcactggtagtgaaaagggtggcgttggtcctgttaatgcagattgggctgataagattattgcagatgaaactgttaagaatctttacaacgttgtagttggtgcaggtgaaaccgattatcaatttgaaaatgctaacttagaccgtgatttcaaggtggatgaatttgctgatattcggactgctaacgaaggtgaaccagatcctgttgatcatttaccgcttaagttcactacttcaattgaagttggtcacattttcaagttgggtacttattacactaagaccatgggtgcagatttcttagatcaaaatggtaaagcaaagcctgtcatcatgggttcatacggtattggcgttactagaatgttatcagcagctgttgaacaacacttaactgaacgtggtgttgcatggccaaaggaaatcgctccatttgcaatacatattgttcaaatgaagatgaataaagaagatcaaactgaattagctgaaaaacttgaaaagaaattcagtgaaaagtatgatgttttatacgatgatcgtaaagagcgtgctggtgttaagtttgctgatgcagatttagtcggtgcaccaattagaattacgattggtaagaaggctgctgatggcattgttgaagttaagcgaccaactgatgacaaagcaaccgaaatgtcaattgatgaattagataagtttgtaaatcaagagttaggataatttttgtggcaaataaaaacgatcttttcttaaaattgctcaaacaggttcaatttcctgatagttttgaagacaatgcgcttctacaaaaagggaaaattgaaaacgtggatgtttacgctaaagaacacaggtgggatatccacgttttttttgatactcccttgatgtatgacacctatgtagcattaagaaaagctgtagaagaaactttttcttcttttgtaaatgtaagattttatgttggaacagctgatggttctgatcaatatttaccagattattggcattatgtagttcaaaattcaaatattttgcaacctgtggctcgtgaatttttggctggccaaaaacctaaaaaagttgatggccgctgggttattccagttgataataatgtgattgatggtttaattgagcagaaggctttagatgatttagctgaaaagatgcgtgattatggcttctttaatttgaaatttataactcagctggatcagacaagttctaaaaacaatttagaaagtttgcaggagttgcaacaagagcatgaaaaaagcatgcaggaagtctttgagaagacgccagacaaacctaaaccgcaacaacctaaacagtatccaactagacgtactaattatggtaaacgtaaattagatgaaaatgctccaattacacaaattaaagagctggaagatggcgtacgtaatgtagtaattgagggaaatatttttaatgttgaaactcgtgagcttaaatctggtgcaatcattttttctggcgaaattacggattatagtgattcaattgcatttaagaaatttgtttctaataaagatgaaattgaagagctatctgcaattaaaccaggaacttgggctaaaatgcaggggtcagttgctgatgatcaatatatacatgatgtagtttttaatattagtagcttagagactgtcgagcatgttgggcgaactgaaaaatacgaaggtgagcctaaacgagttgaactacatgttcatactaatatgagtcaggttgacgcaactaatactccgacggactttattaaaactgctaagaagtttggacaaaaggcaattgcgattaccgatcatggtgatgttcaatcattccctgaagcatatagcagtggtaaagcactggacatgaaaatattgtatggtgtagaagctaatatgattgatgatcatgctttactagttttgaatcctgcaccgatgacctatgaagaccgcgagtttgtaatttttgacgttgaaactacggggttgtcatctgtttacgacacaattatcgagattggtgcggttaagatgaagaacggagaagtgcttgaacgctttgataagttcattaatccgcaccatcctttaagtgagcaaactattaatttgacttcaattacagatgaaatggttggcgcagccgatgatgaagcagttgtcattaagcaattccaagacttttatggcgatcgaccactgtgtggacataacgttcaatttgatgttgggtttgttaatgcagcattaagacgtgcagggctaaaagaaattactcagccagtagttgatacacttgaagtatcgcgtttactacatccagagcagagtcgccatactttagattcattagctaagaagtataatgtttccttggaacaccatcaccgggcaaatcaggatgctgaagcaactggctatttaatgtttaaattgttagatgcttttaataaaaagtatcatgaaaataatttgaataatttgaatggctatgcagcacatggtgaagtttataaacgagcccgtccttcccatatgacagttttggcaaaggatcaagctggattaaagaatctttacaaattagtatcaattgccagcacgaaggactttttccgtattcctcgtacgccgaagtcagatttggctcgtttgcatgatggtttactttatggttctggttgttggcaaggcgatgtctttatcgcaatgatgcaaaaaggttacgacgaagcaagagaaaaagctaaattttatgattatcttgaagttcaacctccagcaacctattcgcaattaattgctgatggtttgattaaggatgaagatcaattacatgaaattattgaaaatattattaaattagggaaggaattaaataagcctgtagttgcaactagcgatgcccactacgttgaccaaaaggacgctatttatcgtaaaatcttgattgcggctcagagatcaaaccctagtcgaaataagccacagccagatttgcatttctattcaacacaggaaatgctagatgcattttcattcttaggcgaagatgtggctaagaaaattgttattgacaataccaataaaattgctgatgaattgtcagaaattcagccaattaaagatgggttatacccaccacatattgaacatgccgatgaagaaatgaagaagttgacctatgataaggcttatgaattatatggtaagccattaccgaagattgttaaggatcgaatagatttggaattaaattccattatttcgaatggttatgcggttatttacttgatttctcagcgtttagtagctaagtcaaataaagatggctatttggtaggttctcgtggttctgttggctctagtctagtagcaacgatgtcaggaattactgaagttaatccgttagctccacactatcgttgtcctaactgtaagtattcacaattctttgaaaatggggaatatggttctggttttgacttgcctgataaagattgtccaaaatgtggaactccattagttaaagatggacaagatatcccatttgcgactttcttaggatttcacggcgataaggttcctgatatcgatttgaacttctcaggtgactatcaaccagtagcccataattttattcgagtaatgtttggaccagataattcatatcgtgctggaacgattgcgactgttgcggataagactgcttacggttatgctaaacactacgatgaagagcatgatttaaagctaagaaatgcggaattagaccgtttggcagctggtgtccgtggtgtcaaaagaactactggtcaacaccctgcaggaattgttgtagtgcccgatgatatggacatttacgattttacgccggtatcgtatccagccgatgatgtaaatgccgcttggttgattactcactatgacttccactctattcatgataatattttgaagtttgatattctgggacatgatgatccaactatgattcgtcacttgcaggatttgtctgggattgatccattgactattccacccgatgaccctggagtcatgtcattattttctagtcctgatattttaggtgttactccagagcagattcaatcagaaactggaactttgggtgttccagaatttggtacccgttttgttagaggaatgcttgaggagactaagccaacgacattttctgaattattacagatttcaggtttgtcccatgggactgatgtatggctaggaaatgctgaggacttaatcaatcaaggaatttgcaaactgaaaaatgtaattggttgtcgtgacaacatcatgatggacttaattcactggggcgttaagccagaagttgccttttcaacaatggaatccgttcgtcatggtcgtggcatcagcgatgaaaatatggctattttaaagaaaaataagaatattccagattggtatattccttcttgtctgaagatcaagtacatgttccctaaggctcacgctacggcttacattttaatggctctacgaattgcttggtttaaagtatattatcctgaaatctattacacagcttacttttcagttcgtgccgatctatttgatttggttgcaatgagtcatggtaagaatactgttaaggctgcaatgaaggaaattcaggataaaggaaacgatgcatcagctaaggataagagtttgatgaccgtgctagaaatagctaatgaatgtctagaacgagggattaagatcaaaatggttgatattgatcaatctgaagcaactgactttaagatcttagataagcatacaattttagcaccgttcaatgctgttcctggtttgggggataatgcagctaagcagattgtagctgctcgtgcagaaaagaagtttttgtctaaagaagatttagctaagcgcggtaaagtatcacaaacaattatgaattatttcgaagaaaatggtgtcttggaagggatgccagatgaaaatcaattatcacttttctgatagttaaattttacaagatcaggtaaaacatggtatactacgtatgaagttcgaataggtaaattcgagtgagcagtgatgctcactctttttattacggaggaaaatttttgtctaaagttatagattctgttcgtccagttgtcgaaacaattattgatgaacatggtgacatgttggttgatatggaatacgttaaagaaaaagggcaaaattatttacgcatttatgttgatcgccaaccaaacggtattgacattgatgagattgcagctttaagtgaacttgtttccgaaaagctggatgctcttgatcccgatccacttccagatccctatgttttggaattatcatctccaggggcagaacgaccaatcaaaacaaaagctgattgggaaaaagctctgaatgattacattcatgtcggtctttatcaaaagattgagaataaaaaaatgtatgaaggtacactcaagtcttataatgatgacgaagttgtattagaaataaaagataagacaagacgaaaaacattaactgttccccgtaagttaattgcaaatattcgttttgcaattgaattttagaaaggttgatcaaaaacttatgtctaaagaaatgctagaagcgtttgctactttggaaaataccaagggcattaagcaagatattattgttgatgcaattaaagccgctttggtagctgcatacaaaaagaattataatcaagcacaaaacgttgaagttgattttgatgaaagaaaaggtaacttcaaggtaatggcagttaaaactgttgttgacgaagtgcaagatgaccgtcttgaagttagtttaaaggatgctttaacaattaatcgtgcttatgaagtaggcgacgaaattcgttttgaagtaacacctaaaaattttggtagaattgccgcccaaactgctaagcaagttatcatgcaacgtctacgtgaagccgaaagaaaacatattattgatgaatattcacaatatgaagatgaattggttactggtaccgtggaaagacgcgacaatcgtttcgtttatgtaaagattggtaatgttgaagctgttatgcctcaccgtgatcaaatgccaaatgaggtttacaatccccaagaccagattcgtgtactagtaactcatgttggctccgatagcaagggtgcacaaattacagtctcaagaactgctcctgacatggttaaacgattgtttgaacaagaagttccagaaatttatgatggaaccgttgaaattgtttcaatcgcacgtgaagcaggtgacagaactaagatggctgttaagtcaaatgatcctaacatcgatccggtaggtacctgtgtaggccaaaagggtgctcgtgtacaaaatgtagttaacgaacttggcggtgaaaatattgatatcgttaagtatgaagaagatccatctgactttattgctaatgcattaaatccagcagaagtgattgcggttcaatttggtgatgatgaagaagaaaaaagtgctttagttatcgtaccagattaccagttatcacttgcaattggtaagaaaggtcagaacgttcgcttagctgctcgtttgacaagctataagattgatattcgtcctgaatctgaagtagaatttgtagatgaaaaaacaaatgatacagctgatgctgcagatagtagcgaaacttctgaaaatgttgaaagtacagatgacgctgctgacgttgaaagctcagatgatacaactactgtagaagattcaagtaaagaagataaaactgaagaataggtgattttttgaaaaaaagaaaaatcccaatgcggaaggatttattaaccgatacaatgcagcccaagaaggaattagtacgtattgttatcgataaagaaaaaaatgtgtcagttgatccaacaggtaaaaaggctggtcgcggcgcatatgtttcccttgatccaagtaagattgaagctgctaaagagaagaatgtattagaacgtagtttaggtgcgaaagttccagatactttttacgatgagctttactcttatgttgatcatcaaaaggcaagaaaagaattatttggtgataaataagattgcaaaatagacaaaaagcaattaatttgttaggtttagctgagcgtgctggtaagttaactaccggtacagagacagtcattaatgaacttaataagcacaaaatcaaagcggttattatggctagtgatgttcaagacaacacggcagaaaaagtaaaccgcgctgccagaaaagacaatattcctatgataactatgtttactgccattgaattgtcaaaggcaattggcaaaaaacgcaaagttttaggattaactgatgctggttttgctaaggcgttagttaaaaaaataaatgaaggagtgtgattggatggcaaagaaaagaatttatgaaatcgcaaaagaagtcggcgttgataacaaagttgtagtccaaaaagcaaaggatttaggcttagatgtaaagaatcacatgtcatcagtagatgattcacaggttgcaaagttaaagaatagtttccaaaactccgctcctgctgcaaaatcttctaataaaaagaataaaataaaaatctctgtttcttctattcgcaaaaatgaaaagaagcaagaagataataatagttctaagaattctaagagacgcaataataaacgtcgttcaaataatcacggtcatgagaataaaaatgatcgtagaaataatacaggtaagccaaaggcagctgctttgttacaacaatttaaacaaaagcaacgggcagaagaagggcaacttaatcgtgaagcccaaaaagccagaaaagaatatcatgagcaattaagacatccaaaacaagaacagccagtgaaagataataagaaaacaagcaaccacaaagataacaagaagaaagcagaaccagtagaaaagaaagttattggtcctaagattttaaagccttctccagctcgtttgaagaagcaacagcctgaagcgactaaagaactagttcaagttactattcctgaggctcctaaggaagaaaaacgcggcaataatcgtggtcgcaacatgggaaagccaggacgcaagggtaaaaatcaatttggcaatggtcgtagtgaccattcagatcgttcagagagaaagcggcgtaagaataaaaaacgtcaacaagagcaaaagccaaagaaaacacttactaagcgtaaggaacgtccattaccagaaacattagtttacgaagaaggtatgaacgctcaagatattggtaagttaattcaccgtgaaccagctgaaattgttaagaaactcttcatgcttggcgtgatgactaaccaaaaccaatctttggataaagatacaattgaacttttagctgctgaatatggtatcaatgctgagcaaaaagttcatgaagacatctctgatattgataatatctatgacaagagaatggaagagtcaaaggaatctaaaaaccaggttaaacgcccaccagttgttacaatcatgggacacgttgaccatggtaagaccactttacttgatcgtcttcgtcatactcatgtttcagctcatgaagctggtggtattactcaaaagattggtgcttaccaagttagattagatgatcgcttaattacattcttggatacaccaggacacgcagcattttctaacatgcgtgcacgtggtgctgaaattactgatattgttgtactggttgttgctgcagatgatggtgtaatgccacaaactgtagaagcaattgaccatgcaaagagtgctaatgttccaataattgtagcaattaacaagatggataagccaggtgcaaatccacaacacgtaactgaggaattaatgaaatacaatttgattcctgaagattacggtggtgatactatcttcgttaatatttcagctaagacaggtcaaaatgttgatgacttattacaaatgatcttgttgcaatctgatgtgatggaacttaaggctaatccaactgaaatggcaattggtactgtgattgaagctcgtttgtcacgtggtcgtggacctgtagcagacgttttaatccaacaaggtacacttaatgttggtgacccgattgttgttggtaacacttttggtcgtgttcgtactatgactaatgatcgtggacgtcaagttaagaaggctacaccatcagaacctgttgaaattactggtttgaacgatgtgcctgaatctgctgataagttagttgaatttaaggatgaaaagaccgctagaagtgttggtgaagctagagcacaacaagctttacaaaagtctcgtgaaaatgttcaacacgtaactcttgataacctcttcgatactatgaagaaggaaaacatgaaggaagttgacattgtcttgaaggctgatgttcaaggttctgtagaagctttacaacaatcgcttgaaaagattgaagttgaaggcgtacgtgtaaatatcattcactcaggtgtaggtgccattaatgaatcagatgtaactttggctggtgcatcaaatgcatttattattgggttcaacgttcgtccaactgctactgctaagagccaagctgaaaccgatggcgtagatattcgtctttacagcattatttacaaggctattgatgatgttactgctgccatgaagggtatgcttgaaccaacttatgaagaaaaggttatcggtaatcttactgttcgtgaaacttggaaggtttctaaggttggtacaattgctggttccttcgttgataagggcttggttaagaatgattctaagattagagttattcgtgatggtatcgttaagtatgatggtgaaattgcttcacttaagagatttaaagatgatgttaaggaagttaagcaaggtaacgattgtggtttaacgattaaggactacaacgacattaaagttggcgacgaattcgaagtttacgaaatgcaacaagttgagcctaagtaattactattaggaggaaaacatgaagcatagaattggtcgtgttgaaggtgaaattctacgcgaattaaccaagattttacaaaagaatattcgtgatccgcgcttaagtggtgtaactattaccgcagttgaatgtacgaatgatctttcatatgcaactgtttattacagcctgctaactgaagatgagcataaggaagaagaggttcaggcaggttttgaaaaggcaaaaggcatgatgcgtcatttgcttggtcaaacattaactgtttataaggttcctgaattaatttttaaacgtgataattcagttttgtatggtagtaagattgaccgtttgattgcagaagttaagaaacaagatgctaagcgggaaagcaaataaaaaagagggcgccgtgatggtgccctttttttgttgaaaagaatagggaataattatgttaaacggaattttagttattgataaagataaagggatgactagtgcagatgtagtttatcatttgcgccgcgtattacatattagaaaaataggacatgctggtacgcttgatcctgaggtgacaggcgttttaccaattgctattggtcaggctactaaattaattgaaatgatgcatactaggccaaaagaatatattggcacgggactatttggttatagcacagatagttatgatgcaactggaactgttttaaaagaaaaaaagttgattcagcctttttctggtgcagaaattcaagaaaatatgaataaatttgtaggagaaattgttcaagtgcctccaatttattctgctgttaaagtgaatggtaaacatctttatgaatatgcgcgtgaagagattgaagtcgagcgacctcagagaaaggttgaagtcaaacaatatgatctaactaaagaaccagtttttgatataaatactgggcaagaaagctttgattttaagattaaatgcagcaaaggcacttatgttagatcgttagttaatgatctaggtgaaaaattagattgccccgcaacgatgacttatttgagaagaacagctagttctggctttgatattacacaagcagtaaaattaaaggagattgaagagaatccgaaaaaggccactgaacttatacagccgattgatgcattttttaaggaatacactcaggttgatttaactgaagaaaagtggcttaaagttaaaaatggagcgggtatttcgcttgaaactaatgcgaaaaaagttgcactacgatacaataaaaaggtgaaagcaatttatgaaaaaaaaggaaagctttatcgcccaagcttaatgctgttgcaaaatgaataaatgaaatgaaggaattagctgtgaaaatcgttcatttaacatatcctgttaaggaaaatattttatctactagaattgtgcttgcccttggcttttttgatggggttcatttgggacatcagcgcttaattaatcaggctaaagaaattgcattacagaagaaattgtcattagttgtgttgacctttgatcgacatcctaaggaagtttatgagtcgaaacgagattttaaatacttagaaactttggaagaaaaagctaacaaaatggcggaattaggagtagattatttggctgttttaccatttactaaaaatttcagtcaaatttctgcacaagaatttgtcgataatgtaattgtcagattaaatgctgataccgttgttgctggctttgattacacttatggttctaagaatattgcaaatatggctaatttaccccaattttccaaagggcgttttaatattgtagtgatgccaaagcaaacttttaacggtagaaaaattggctcaactgaaattcgtcaagcaattaaggatggtcagatgaaattagccactgaattaatggggcaccattatgtaatgagtggtatcattgggcatggtaaacgaaatggtcataagctaggctatccaacagctaatttgatttgggcagaacataaggtgattcctaaaattggagtttatgctaccaagactaaagtaaatggtaagtggtataactccatgactagcgttggctataatgtaaccattaatcaggacaagaagatatatattgaatctaatatttttgattttaatgaagatgtctatggtaagccaatgaagatcaaatggtataaatataccagaggtgagaaaaaatttgccggattacctgaactgaaagagcaacttgaacgagatgagcaagaaattagggcttattttaagcaaaagggttaagaagctacgtactttgaaaaaagtgcgtattttttgaataaaattagcaatctacttgatttagtgctaatttctggtatcatattaactgttagcacctgagagatgtgagtgctaaaagtgagggcgatataatatgttgaccgagcgtcaagagcttattttaaaaacaataattacagactttacacaaagtcatgagccagtaggctcaaagaccgtaatgaagcagttgccaattaaagtttcaagtgcaacgattagaaatgaaatggccgtgttggaagagcaggggttaattgaaaaaactcactcttcaagtggtcgaattccttcaagcgagggctatcgttattatcttgataatttagttgagccgttgcaattaccagagtctgtttataatacaataggaagccaattagatcgaccttttcatcaagtaaatgaaattgtacaagaagctgcacgaattctgtcagatttaactaactataccgcatttgcggaaggacctgagagtcatgatgttagagtcacaggatttagaattgtaccgctgtctcaacgacagattatggcaattttggttacaagtgatggtaacattcaaaatcaggtatatgctttgccacataatattcacggcgaagaaattgaaaaggctgtccgcatgattaatgatcagttagtcggaaagagcctaaatgaaatcaacgtttcgttgctaagtgaattagctaaaaacgaattaggcggcgaacatgtgactgaattgcttagtttagttgaagatgtcgtaaaagatgcagctagtgagcagatgtatgtggatggacagattaatttgctcaataatacttctgaacatgatgtaaatgacattcgttctttgtacgagttgattgatcataataatctgttcactaatttaatggatgcaaaggtggatccaaagtctggaaattattcagtaaaggttaagttgggatctgaattacccaatgatttattaaaaaattatagtttgctgacagctgagtacagcgttggctcccatggtaaaggaactattgctttacttgggccaacgaatatgccatattcacaaatgattgggttgcttgaatattttagaaatgaactagctaaaaagttgcttgattattatggcaagtttcaataaaggaggttagccgtgagtaaagaagaatttccaagtgaaaaaaatctagagcaaaaagaaaagacttctgagcctaaggctaaaaaagaagccgataaaggtgaagaaaagaagcaagaaaaaaataaacaagatcaaaaattagctaaagaattagctgatttaaaagataagaacaaggatcttgaagataagtatttgcgtagtgaagcagaaattcaaaatatgcaaaatcgctacactaaagaacgtgctcaattaattaagtacgaatctcaaagcttagcgaaggacattttgccagcaatggacaatttggaaagagccctaagcgttgaggccgatgatgatgtgtctaagcagttaaagaagggcgtgcaaatgaccttggatgcacttgtgaaggcaatgaaagatcacggtgtagttgagattgaggctgatggcgttaaatttgatccgacattacatcaagctgttcaaacagtagcagctgagaatgatgatcaaaaagatcacgttgttcaggttttacaaaaaggatatcaatataaggatagaacactaagaccagcaatggttgtagttgctcaataagagaggaagctaatatatgtcaaaagttattgggattgatcttgggactactaactcagcagttgcagttcttgaaggtaaagaaccaaagattatcactaatccagaaggtaaccggactactccttcagtagttgcatttaaagatggtgaagttcaagtcggtgaggtagcaaagcgtcaagctattaccaaccctaataccattgtttcaattaagcgtcacatgggtgaagctgattataaggttaaagttggtgataaggaatatacaccacaagaaatttcagcatttattttacaatatattaagaaattctcagaagattacttgggtgaagaagttaaggatgctgttattactgttcctgcttacttcaatgatgctcaacgccaagctactaaggacgctggtaagattgctggtttgaatgtgcaaagaattattaacgaaccaactgcttcagcattagccttcggtttaaataaagaccaagatgaaaaagtcttagtatacgaccttggtggtggtacttttgatgtttctgtattgcaattaggtgatggtgtcttccaagtattgtcaactaatggtgatactcatcttggtggtgatgactttgatcaccgtatcatggattggttaattaagaactttaaggatgaaaatggtgttgatttgtcgaaggacaagatggcaatgcaacgcttaaaggatgctgcagaaaaagcaaagaaggacttgtcaggtgtatcaagtactcacatctcacttccattcatttctgctagcgaagctggtccattacaccttgaagcagatttaactcgtgctaagtttgatgaattaactgctgacttggtagaaaagactaaggtaccatttgacaatgcattgaaggatgcaggtcttactgttaatgacattgacaaggttattttaaatggtggttctactcgtattccagctgttcaaaaggcagttaaggaatgggctggtaaggaacctgaccattcaattaaccctgatgaagctgtagctatgggtgcagcaattcaaggtggtgttatctcaggtgatgttaaggatattgttttacttgatgttaccccattgtcacttggtattgagaccatgggtggtgtcttcactaagttaatcgacagaaacactactattccaacttcaaagagtcaaatcttctcaactgcagcagataatcaaccagctgtagatgttcacgtattgcaaggtgaacgtccaatggctgcagacgacaagactcttggccgctttgagttaactgatattccaccagcaccacgtggtgtttctcaaattcaagttaccttcgatatcgataagaacggtattgtaaatgtatctgctaaggatatgggtactggcaaggaacaaaagattactattaagagttcatccggtttatcagatgaagaaattaaacgtatgcaaaaggatgctgaagaacacgctgatgaagataagaagcgtaaggaagaagcagaccttagaaacgaagtagatcaattaatctttactacagataagactttgaaagatactaaggataagctctctgatagcgatcgtaagccagttgaagatgctcttgaagctttgaagaaagcccaaaaggacaacaacttggatgaaatgaaagaaaagaaagatgctttatccaaggctgctcaagacttagctgttaagttgtatcaacaaaatggtggtgctgctggtcaagctggtccacaagcaggtcctcaaggcccacaaggtggtaattcaaataatggcaacaacggtaatgcccaagatggtgaattccacaaagtagatccaaataagtaatgggtttataattaaacaaaaggagaaaagaactacccattgagtagttcttttcttttgagaatacaaggagttcaaatagatggcacaagaagattactataaagtacttggcgtagatcgtgacgccagtgatcaggaaataagtagggcatatcgtaaattagccaaaaaatatcacccagatttaaaccatgaacctggagctgaagaaaagtataagcaggttaacgaagcctatgaggttttgcatgataagcaaaaacgtgcgcaatatgatcaatttggttctgctggtgtaaatggtcaaggtggctttggtggtggagctggtcaaggctttggcggtgccggatttgatacttctggctttggtgattttggcgatatctttggcgatatttttggtcaaggccgtcaacagagggttgatccaactgcaccacaacgtggccaagatttggattatcaattgacaattgattttatggatgccattaagggcaaaaagacccaggtcagctatactcgaagcgaaacttgtgaaacttgtggcggtaatggttgtgaaaaaggtacacatccaattacctgtgataaatgtcatggaactggttatatgacaattactcaacaatcaatgttgggcatgatccgtcgtcaaaccacttgtgacaaatgtcatggtcgtggtgtgattattgagtatccatgtaaaacctgtggcggtaaaggaacagttgaccgtaagaatactattgaagtggatattccagcgggaatcgacaatggtcaacaacttagatatcaaggccaaggcgaagcaggtataaatggcggaccatatggtgatttatatattaactatcgaattaaaccatctaaagattttgagcgtcgtggccagactatttatacagaagtaccaatctcatttgctcaggctactttaggagatgaaattaacgttaagactgtgcatggtgatgtaaagctaactattccagctggtacgcaacctaataagaagtttactttgcgtggacagggtgtgccatatcttcgtggtaatggcaatggtgatcaaattactacagttaatattgttattccaaagcacattaatgataagcaaaagaaagatttgaccaactttgttcatgatggtggtggcaatattacaccacaagaaaaaggattttttgaacgcttaaaagataagtttaatatgtaaatgctaaaaaggtttctgctacttgcaacagaaaccttttttaagatcaattaattttttggtgatttttagagtttttcttggaaaatattcaatgctgaattttcaattattattctaaaaactctgcattttattgaaaatttactatgctacaatttcatcatttattctagctttgctataattaatacatagtaaagggtgaacgattttatggatttaaaaaaattaaaagactatcaaaaacacattcgaaattttgctattgtggcgcatattgaccatggtaaatcgactattgctgacagaatcttagaattaactgatacagttagtcaacgtcagcttaaaaatcagatgttagatgatatgccacttgaacgtcaacgtggtattaccattaaaatgaactcagttgaagtgaaatatcatgctgaagacggtgaagactacattttccacttaatcgatacaccaggacacgttgacttttcatatgaggtatcacgttctctagctgcctgtgaaggtgctttaatggtggttgatgcttctcaaggtgtacaggctcaaactttggctaatacttatttggcaattgatgacgatttggcaatcttgccagtaattaacaagattgacttaccatctgccgatgttcctaagactaaggaagaaattgaagaaatgttaggtttggatgcttcagaagctgccgaagtttcaggtaaaaccggtcaaggtattaaggacatgctggaaaaggtagttaaagatattccagctccgtctggtgatattactgctccattaaaagcattgattttcgactctaaatatgatgattatcgcggagtggtaatgtctgtcaaaattgaagatggatctattaaaccaggcgatcgaattcaaattatgaatactggcaaggaatatgaagtcacagaggttggtgtttctagtcctcatccaattaagaaggatattttaatcgcaggggatgtaggatatattactgctaacattaagtccgttcgagaaacacgtgttggtgacacaattactcaagctgataacccaacggctgaaccacttccaggctatcgtcaaattccaccgatggtttattctgggatgtacccagttgacaaccgtgattatgaagatttgaaggaagctttacaaaaactacagctgaatgatgcagctttagaatttgagcctgaaacttcaacagctttaggctttgggtttcgttgtggcttcttaggcttacttcatatggatgttgtacaggaaagattagagcaagaatttgaccttgatctaatcatgacagcaccatctgttgattatcatgcaattatgaatgatggaacaaccaaggtgattgataatccatctgatttgccagatgctggtgaatataaggaagttcaagaaccttatgtaaaagcggaaattatggtgccaaatgattttgttggtccagtaatggagctttgtcaacgtaagcgtggtgaattcgttaccatggattacttggataagtaccgagttaatgtaatttacaacatgccattagctgaaattatttttgatttctttgatgatttgaaatcttcgactaaaggttatgcttcacttgattatgaaattacgggttatcgtgctactgatttggttaagatcgacattttgcttaacaaggagccaattgatgcattgagttttattgctcacagatcagaagctcaagatcgtgcccgtcaaatgacttcaatgctaaaaaaactaattccacggcaaaactttgaagttgatattcagggcgcaattggagctaaaattatttctcgagctacaattaagccataccgaaaagatgttacctggaaaatccatactggtgatccagatcgtcgggctaagctgcttgaaaaacagaaacgtggtaagaagcgaatgaaagcagttggtagagttgaagtacctcaagatgctttcatggcagtcttgaagatgaacgatgatgacatcaacggtaaataaaaatggctaaaaataaaaaaaatagtgtaagtacaattttacttagagttgctgctatcatattattgcttgttggtattgctttgatatttaacaaacagatcagtgatcaattaattcatcataatcaacaatctactttaagtggaataaatagaaagacaattgaagaaaacaaaaagaaaaaaggaatgtatgattttagtaaagttaagtctttaggcattgcacaagcagcaagatcacaagtgaaaaagacttctggtgcgattggtgcgttagctattcccgatgttaatatgtatttaccgattatgttggggatgagtgatgatgcaatgtcgactggtggcggcacgatgcgagccgaccaagtaatgggtaagggaaattatcctcttgcaggtcactacatgacagcaaaaggtattcttttctcaccacttgaagatgttaaaaaaggtgagttagtttatttaactaatcttaacaaagtatatgtctatcgaatttatatgaaaaagattgttgatccaactgcggtttggctagtcgataatactaagaagaatattgtaactttgattacttgtgctgatggcggtaagaatcgttgggcaattcggggtaatctgattaaaactgaaaaggctaacaacaataatcttaaggtttttaaattaaaataaaaatttacaatctttaatcagatttagatttgcgataaaattataaatagattttgtaataaagacactcaacaatgagtgccttttcgttttgatgagagaacataaggtgtttgataattaatgaaatggcaagaaagaacagctgatgaattagcaccagacttgattgagaaatatcaactaggtcccattgcagccaaactttttgcattgcggggtattaatacagacgaaaaacttgatttttggtttaatgcaacagaagaaaatctggctgatccagcgttaatgcatgacatggataaggcaattaaccgaattaatcaagcaattgatagcggcgaaaagattacaatttatggcgattatgatgctgatggaattactgcaacgactattatgactgaaaccctaagcattttgggcgctgatgttcattattttattcctaatcgcttcaatgatgggtatggtcctaatatggaccgctatcaagatattgtagctgatggaaccagattgattatcactgttgataatggtgttactggggtcgaggaagtcaaatatgctcaagaacataatgttgatgtaatcattacagatcatcatacttttcaagaaaagaaaccggcagcttatgctactgttcattgtaattatcctggccaaaaatatccttttgatgattattgtggtgccggagtagcttacacgatttgtcgtggtctaatgcaggatactatgcctgagctgctagatttggctatgatcggaactattggcgatatggttaaggtgaccggagaggggcatattatcgttaagcgtggtttagaaatgcttaatcagacagatcgtcctggcttgcgcgctctaatcaaaaatgctggtttgactttaggcagtattaatgaaactgatgtcggctttaatattgctcctcgattaaatgctgtaggtcgattagataatgccaacttggcagttgagcttttgctaagtgatgatgaccttgaggcccaaaaaattgcagataagatcgaagaattaaacaataaacggaaagaattaaccaccgaagtctatgacaaatgtatgacgttaattcataaaaatagctggcaaaaacaaaatactttggttttatatgaccctgaatttcacgaaggtgtgttaggtttagtagctaataagatcgttgaaaagacacataaacccacgattgttttgactaaaaatgatgcaggtgaggttaaaggctcaggtaggtcctttgctggtttcaacttgtttgatgctttaaatccgatcaaggatcaatatttaaccaaatttggtggccatgattttgcctgtggtttatcattagaagaaaatcagattgcgccattacgggaaaaatttgaagatgactttcatgttgaaggtggtcttgagactaaaaaatatgacatggaattgcctatgcagggcttaactccgcagacactagcacaaatcaatcaagtaggtccatttgggacaggtgacacgcagccaatctttagtatctctaatccaacaatcactcatttctttaaaatgggtaaagataagaatcatgtcaaatttacggttgctaaaaaaggcggtaacttatcagttattggatttaataaaggctttttgaataataatcttttgccgtttatttctcaaatttttgttcaattatcattaaatacttatcgaaatcaagtttctttacaaggaatcatgaccggactagcttttgcttcaccaaaattggcagtgccaacgccagttgttgacttacgccaagagaaatatgttatgggtttcgcggaccgctacctgttatttgatcaaaaaaatattccgattgttcgcaaccgactacagatcgatgaagacaagatctctttagttaaagattatgatcaaactggtgaaacagttgcattattagatgtgccacgcaatcagattgaattaaatgctgcattggagaaagattatcaacaaatctatttacgctttttgcttgatcaattgcctgttgaacaaattcccgctaaaaattattttggtgctgttttaaaatatatttatagtcaccctacgttaaagccagcagattaccgtacagttgcaccttatttgggactagattatgatagtgtgcttttcattttacgagttttctttgaattaggctttgtaaaattggatgaaggtaaattggtaggagagccttctcctaaaaaacagccgctgacagcttctaaatatttaatgggaacttcttctcagattaaatttgttaatcaactaagaactatgcctagtcaacgtttgattacatatgttaataatttgacaaataaatagataactattctgttttcagtgcttttatcgttaaaatttgttaaaatatactggtcaaaagcgtttgaacacaaacacagagcattttggaggttatgcttcttatggcagttgattttagtaaatatattgcaagtgttaaggattttcctaacaaaggcattgtttttcgcgatattacaccaattttgcaagatggtgaattgtatcgtgccgctactcatgaattagcggaatatgcaaagagtaaaaaagcagatgtaattgttgggcctgaagcacgtggttttattgtaggttgtccagtagctactgagttaggtttaggttttgtacctgcaagaaagccacataagttaccaagagaagttgaacgtgcttcctatgatttggaatatggttcaaacagtttggaaatgcacaaggatgcgattaaacctggacaaagagtggttgtctgtgatgacttgatggctaccgcaggtactttaagagcttctaaagagctaattgaaaaccttggtggtaagttagttggtgccgcattctacatcgaattgccagatttacacggtagagataaattacctgatgttgatatttattcatttgttcaatatcatggtgcttaaaatagaataaataaaaagagggaattaaatcaatttgaactgagacctaaaagttagacacttttaggtctttttctacgtaaagtcaagcataataagaagtttggcttcattttttgtttaaatttcaacttaaacatcttttagtgtcgatttatttttttagttagacacgacaaataagcccagatccatatctgatttttgggcttagcgttataatgtacttgatcaattaattacgactaaagtctttttgattatgtgtggctacgttgtaatcatatggttgatcattgataatcagggcataaatggttctgattagtttatgaattgaagcaatagctatctttttgaaccctttggtttgagaggatagctttttgctttcataataatctgctatatgacacggatttgtcttagctgcattatcaatttgtccaatagctcgataaagcaacttacgtgcgactgcattgccatgtttagtaatacttaaattagagtccatttctcctgactgatatctgcctggatcaattccgataaaagcattgattttattaggattactaaatctgcgtaaatctcctaactctgctaaaactctgacagcagtggtctgtgcaaagcctggaatgctttctaggttttctaaatcatgattaggcaaagacttcgctaacttaaccattcttgcgattaaattttctctttgatcacttaaattaagcaatctgtgtgcataatactgcacttgctcgacttctatgctagagcaagatacaactggataagcttgataagctaattcaattaatttatctgcagtccttagagcgtgtttaaaagcaatcccctttaagctcattaaccagttaataagctgttttttatcttctcttcttactaagtcacaatgaggatatcgcacaactatttgccagtaatttttacctttagcagaagaaaataaattttcaatttcaggaaaagtcgattgtagagcttggtgaagtcgatttttagctattaccaagtcacttgtcagctggtcatagaagcggctcaaagcattaagctgcttataagtttgggattcgctttgattaaccggatggcgataaagtctttgaattaaagctaaatgataagcatcagttttatcggtcttgttgtagcgtagccccatattcatctcttttttggctttaagcggattaataacaacatattcatagccgtagtcttcaagaaaagcctgcagtctgcgtgaataaacaccggtagcttcaaaaataatttgcggatgtttagaaaaagcggttaattcatgaagcaattgaataaaaccaggacgattattagtaatggttagttcatttttgctttcaccaattagttcacaaacagtagaagtagacttgcttacatcaattccaaaagtaacttgcataataaaaacctccaaaacttagtagtaaaacgtatttacttaagaaatcagatctaattttctaaactcgacatctagtgtccacattcttcgaagagactattgaaaacttaagtaaaactgccagtttattatgcgacatcaagtgtctaaagacctcagggcatatcgttttaccactactttaattctacaaaagaataaaaatagtgaatcaattatcccgtcggataactaattcactatttagcttagaatgtttattatttgttaccgattaatttaaattttgaccatggtttaataaagtcgagcaggaataattcgtctgatctaatagaaccgactttgttcatccttgactccttatgaggttcaaggacaatttgtagttcatttttgtaatgaccaaagttgtcgttaccaatgataatatctccgcgttggaattctacattgttgtcgtgtactggattaggaatatctgcataagttacacggggcatggttgaacgaattacatccttagtgatatcaccacgacggaaatgttgaggcgcttctacgatagttttctcaatcttattaacatcagtaacgtagtttacgtgcaacatcaattgatagcgattaactttagataaggcttttaactcggcttcactggcataagcattaccgatgattacatcatcaatcaacccagaagcccagagatgcattgcttgcacatcaattggtaaattacggtcttgctcaagcgttggtaaaccatcttccacgttccaaggtcccatttgacctacttgacttgagacaaaagcggctgaatgaatgccaaactttttgaagcgttcagaacaagcgataaagaagtcgtaaggtaagccagtaccgcgttgaggataaaaattgtgacagccataaataaacggtgtattagcttggtaagaaataatattgttaagatagtcaacattattactcatgttgagttcaatgattagaccatatgggttgtaagaaagcattgcttcaattgcaccatcaaatgttgtgtcaagacggatgcctgctgcaccaatatcagcaaaaaatttcaggtcatcatagctgacacctagttgtttgaagattgcaggattaacatctaaaaaagtttgaaatcccaatttattgccatattcaatgatttttttatacttagctttggtttcttcagggctgccttgtacttcaagcatactcatgaagatacgagaaaagccatatttgtgagctaagtccagatagtgagcgttgccttcaaatttgctgtggcctggataaattgacagacctaaagatctcattgtcataatagtacctcatttttgataattgtctataccaattatatgatattttttattgtaggtctagtccaaagtgaccgagatagtttatattttggtagggtgtctcgctacgtttttaattaaacaggtgttatatttaaagtacagggtatgtgttaagaaggagaaattaagatggataattttgatcaagaatctggtcaacagcaatatgctaatgattcaggattaaatgttttttagcaaaatatatggttatatggccttagcggttttcgtttcagcaattagtgcttatttgacaatgacggtttttgcgggacctatctctgcctttattgcacaacaccaattgtttacggcgttacctttgcttttattgcaggtgcatatagtggacaaaatattgcttcagcatttgtagcttcggcaaccgtctttgtaacaatggcgattttaggaacaattaccaaaaaagatttgagtcgaatagggtcttatgcttctgctgcgttaattgggttgattgtagccatgttagctaatttgtttttacataatccaatcattgactacgttttttcgattattgctgtgattatatttactattttaactgcgtgggatgcacaaagaatgaaagatatttatttacaatatggtgatgatctttcaactaatgggcttgcagttttaggtgctttgcaattatatcttgattttgttaacttgtttttacaatttttggatatttttggtgcaaatgaagataagtaattaaactagtgagactgtaaaatagtttgtgtaaggatgaatgattccttaaatttatttctttaaacattagaaaaaggagttcctttctcgtatgattggtttgaacaaaaaaacacatacagaaagaagaactccttcatgaatgattttaccaaaaatatagcacaagctctattcaatcaagacaaaataaatgatttattgcgcaaagagctacaacaggctgttaataacttgttagaagctgaattgactgcctttctgggctatgatccctatgccagaaatggctggaatactggcaactctagaaatggtgcttatttccgcaaagttgatacgcaatttggcccaattgaagtgcaagtgccccgggatcgcaacggtcaatttcatcagcacacgctgcctggctacaagcagcactcggatatcttggaaagcatgattatcaagctttactccaagggcgtgaccaccagggacatagccgatctaattgaaaagatgtatggcagccattacagtccagctcaggtatcaaatatttccaagcagatgattccaaaggttgaggcttaccacaaacgcaagctaagcgacaagtttttctgcgtctatttggatgcgacataccttcctttgcgccgagaaacatttgagcgtgaagcagtctatattgccattggcatcaagcctaatgggcacaaggaggtcattgactactgcattgcgcctagcgagaacattgaagtctggacagatatgcttcaaaacatgaaatcccgaggcttaaagcaagttgagctttttctttctgatggtgttgttggcatgaaaacagccttggccaggacttatcctaaagctcattttcaacgctgtttggttcatgtcatgcgcaatatctgcgctaaagtacgcgtcgacgatcgtgaaaagatcatgaacgaattcaaacaggtgcatcaacagacaaacaaagaagaagccacagctgtcctgcatgacttctataccaaatggggcaaggtttacagccatgttatcagaagcttgaaagacatagaaccagatctgctggtcttttataactatcccaagcagatcagagcttcaatttattcgactaacatgattgaatcatttaacaatgtgatcaagcgcaaagctaagcctaaggcagagtttccaactgaacagtcgcttgatgcttttattggcattcaggcaatgagctacaatgaccgttatttcaatcgaattcataaaggctttggtcaggttcaggacaccttagaatcctactttgattaaataaataattaaaaaatcaatttacgagaaagaactatttacacaaaagatttgacagtttcaaactagtttctaataaacgtaggaacacttcatatataaacgtatactatataaatatagtgacatattaagggagtgtttttatgaaaagatgcaagaattgggttgtgactattgttgcatttctgatgttagtgggagaaatcagtgttctgcctgcaaatttgcaggggtcgacatcagttgttaatgcagctattcatcacagaaggagaaagcatcaatatcgtgataaaactaagatttataccagtaattacagaattgttgataataaacgatcaaaaatctttcacgtaatgcgcggtcataattatcgaatgaatcgtgaaaatgcagttttcttcaagagtaaagcagcagcacgtgcagcaggatatcgtgaatcaaaaagataaattaaaagacttctaagagttcaaagttcctagaagtcttttaatttataaaatttatggtaataatctacctgtttttcatcacaggttggtaaattaagtcgattattatggcagcaataatcgctacaattacagtaattgctaagttttgaatggaaatctggaccattgcccaaccacaaagagctaagataaaggtcaatagaacatctgcaatttgaacactaccaaccaacttggatgggtaatcttgccaaaagtacttacgagttctagtaatcaaaacaatcaacattgcgctaagaactaggtatacgtaaaccatagtagaaacagcaccgtgactccaaccgtgtgtgtttaagaaccaaacaaacccaataccaattaaagtccaaccagcagctagtgaaaaggcgatcttagcaagcttagccatattccagttttctggcttataagtaatgtgagtcctgtcagttccaatcatcatcgtaaccatattgttcataatggtatagataaccattgcattcaaggccattgggatgtagtcaaagaaaagatagccaaaagttaacagcatcgttaattcagcagttctagcaagcttggttagtgaccaagtagtcattctttggtatacgcgatgtccagcgtctaaaattttaacaattgagcctagaccatcgtctagtaataccattttacccgaacgcttagctacgtcagcagcatttgaaactgcgattcctacttcagcttgttttaatgcaggcgcgtcgttaactccgtcacctgtcatccctacgatatagcctttttcttggaaaagctttaccatcttgagtttatcttctggtaaaacatcagcaataccggccaaatcattaatatcagtattttcattgaaatcgtgaatcgaaattactttaccagttaaatcaacttgttctgccactgcagcagcggtcttttgattgtcaccagttaacataattgggcgaacgccacgtttcttgagttcagccaaagctgctttagagtctgttctaactttatcttgtaagatgaagacaccagctaacttatcgtcaatcaagactgccactgagcgtcctgccttgaaattaattccagaaatttcttcatcggcatgtttatcgatcaaagataattgcttaaatgaaccaagctttacattatgtccagcaacatcagccatagaataaccagtgtcagaagtaaatggagtaaagttttcagcattcatgactggaatgttattttctactaagtattcatcgattgctgtatcgataataccagcattacgtttatcagttgcggctccagctaaagcaagcacgtctttgtcaggcaagtcacttagatcagtccaagcggctacggcagttttgttttccgtaattgttccagtcttatcaagtaaaagcaagttcaagttagctgcgtcctgaattccagttaggtcagaagtcaggactccttctttacttaagcgggttgcttcaaatgagttggataaagcaaaagttgatggcattgctacaggaattgaagcaataaacatcattgccaggaatggcaacatattaataaaggtattgaaattaccgcctttgaagaaggaggcgataataataactaaggttaaaacaccatctagtaagcaaaggtagtagataatcttagtcaaaagttgttgtaagtgaccaggagcagcggaattgttgatcaaattaatcgtcttaccgcttctagaatctttacctgtagcagtaacaacagctaggccatcaccttcaacaactgtagtaccggcaaaggcggtgtcatcaattgctttcttaactggtttagattcacctgtaattgagctttcatcacaagctaagttaccgtcaacaattttaacatctgctgcgagtacgtccccgcgtttaagtgagattaaatcgcctttaactagttgtttagaatcaagtttgatccacttgccatcgcgttcaactgatacagtaggagtcaacttgtgtgaaatattatttaaaactcgtcttgattgctttttcttagatgcaccgttaaatgcagcaaataaaagcatcaacaacacgaataatgattggacccatttgcccaagatacattctagaattaaagcagcttctagaatccaagcggataggttccataacttagacaagaactctttaaagaaattgtattcaggctctggtacttcatttaagctatcttcttttaagcgcttgtctgcttcggcttgagttaagccgtgaaatttatcagacattattttccctccaaatctaccttaataaggtagcacagatattgctatgaataaaatactaaaatacaatataagatattaaatattttaatatcactatcaattgaaataaaaaaaggataaataatatgaatctaaaacagttacgttattttctagttgtagcagaagaaaagcagattacagcagctgctaagcgcttgtatattgcacagccaccattaagctatcaattaaaacaattagagaaagagttgggcgcgcaattatttaaaagaacggcacatggtattgagctaactgatgtgggacaaatttttcaaagctatgccaatgaaattatttctctagctcaaaatgctgaaaaccaagtacataagactatttccggtgaattgggaacgattgcaattggaatggcatcttcctcaacgggcttgataccaatgaattcttttaatgaattacgaaaatattatccggaaatttcttttgatatttatgaagataatacttatggcatcctggataaattagaaaaaaagacaatcgatctaggcattgtacgaacgccttacaaccagacaggtttaaatactaagactttaacaactgaaaaaatgatggctattagtgtagacccagattttcagcaaaaaaaagaattacgcattaaagatctagcagatcagccattgattatttatcgtcgctttgaggatatttttaatcaaacttttgcacatcatgggcttaaaccattttatgcggttaagtgtgatgattcacggacagcaattacttgggccaagagaaaaatgggagtagcgctagtaccagaatcaattgcgacaacttatgcccaagaaaatatgatcgcaattaaacatgctaattggataacacatttgcagctggtttggcgtaaagatcatcaagttacacctttaatgaaaaaaatcattgctgcaatatgataatactgtaacttttacctaattgatccataataaatgtaaacgggtacaataattaatagaaggtggttgaatgtcgagtccgattcatgtttattcagaaatttgtaagttaaaaacggtgatgttacatcgaccgggaaaagaactagaaaatctagccccagatattttgcatcgaatgttgattgacgatattccttatctgaagattgcccaagaagaacatgatgcttttgcgcatgtattgaggcagcaggggatcaaagtattatatcttgaggatttattagcagaatctttaacagatgagaaagttcgtcgggcattcttagatcagttactggatgaatcaagtattaaaaaacaggatcctttgcatcaattattgctgaactatctccaagaattgctaactaaggaaatggtaaaaacggtgattgctggaattagaaaaagtgcgattcataattctaccccatctttagcagatttggctgaggacccagattaccctttttatcttgatccaatgccaaatgtatattttactcgagatcaacaggctgcaattggttcagggatgaccattaaccggatgactttcagagctagacgacgtgaatcattatttatggaaacaattttgaaaaatcatcctgatttcaagaacgcaactattccagtttggcgtgaccgttatcatcatggtcgccttgagggcggggatgaactagttctaaataaccatgtgttagctgtaggtatttcacaacgcacttctgcaactgcaattactgacttagctcataatttatttgatcattcaagttatgatacgattttagcgattaagattccgcacaatcatgctatgatgcaccttgatatagtttttacaatgattaattataatcaatttacggttcatccctttattttagataaagccggcaaaattgatatttatgttctacagcccgatgatcacaacggtgtaaaaatcacagaaaagaatgatttggtgcaggttttgaaagaaaacttacatttaagcgaattggatttaattccaactggtggtggtgatccaattgccgcaccacgtgaacaatggaatgacggctcaaataccttggcaattgcaccaggtgaagtcgttacttatgatcgtaattatgtatccaatgatttgctaagaaaacatggcatcatcgttcatgagattcggtctagtgaactctcacgtggtcgtggcggtcctagatgtatgtcgtgtccgttgattcgtgaagatttataagaggcaaaaaatgaaatatttacaaaatgtttttcaaggtagaagttttctcgattgtaaagactatactccagctgaaatttcatatttaattgattttgcattacatttaaaagaacttaaaaaagagcatatcccacatgaatatctgaaaggtaaaaatattgcactactttttgaaaaagcctcaactaggacgcgatctgcttttgtagtagcttgtaatgatttaggtgctcatccagaatatctaggcgcaagcgagatccacttaggtaaaaaagaaagcgtcaaggatacggctaaagtcctaggctcaatgtatgatggaattgaatatcgcggttttgctcaagaagatgtagaagagctggctaaatattctggcgttcctgtttggaagtgggtgatggccgcgataatgttgccgacagtcttttagtttgtggctcaatgttaggtgttaatgtacatattgttacacccaagcctttgtttacacatcctgatgtacaaaaaattgctcaaaattttgcccaagattcaggttcaaaaaatttgatcacagatgatattgctcaaggcgttaaaggagccaatgttgtttataccgatgttggggtttcgatgggtgaaaatgattggtctgaacgaattaaattattaaagccatatacggtcacaatgaaaatgatgcaaatgactggtacaccagatgaccaattgatctttatgcattgtttgacagcttttcatgatcgaacaactcaggtgggagaagaaatctatgaaaaatatggcttaaatgagatggaagtaactgatgaggtctttaattcaaagtatgcttggcaatttacagaagctgaaaatcgattgcattcaattaaagcagtgatggcggctactttaggaaatttatttattccgattgcctgtggcggtggtggcatccttgttattgtgaaagatgggcatctcagaggtgttgccggcgtaattcataaagatttttccgctgctaaaatggcagaagatatcaacgctgatgaattagtaattctaacaacggtggatcatgcatttttgaattatggcaaagaaaatcaacaagcaattggtaaaataaaagttgaacagctcaaacaatatctagcagcaggttatttcgcagctgggagtatgaagcctaagatagaagctgcaattgaatttgtagaaaaaacaggtaatttagcaattatcacctctttgagcaatgccaacaaactagcagacggagtcggcacaatcatttataattaactgggtgataaaaatgaatatttttaatgaaggaaaaaagcaggatattgcccaagttttagcagctaaagataggcgagtagctgtacaacataagatttttaataagtatcctaatcaaactctagtcgacattaatatgaatatcccaggaccaatcaagaataatcgctatttaactaaaatgtttatgttgggtatcaatgagctggaaaatgcttggactaacctaggttatcattttaaattggtgacacagcttaatgatgatagtggctgtgaaaacttttatgtattatctttgtcaattgaaaaagtaaagcgctcaacaattgattttgagaatcagatatcattgggacgtctctttgatgcagacgtgttggtaaaaaataaacaagctgcaatttcacgcagagatttgggcaggcagccacgtaagtgctttttatgtgatcgccctgctaaagaatgtgctcgtagccggagacattcagtggaacagatgcaggcatttatctctcagctttatcaagaatacgttgcgtaaaataaaccgggattttatgattccggtttatttttatgaaaaatctagttaaaaatttaaaaaatgaactaaaatagtaatgaataaatttatagatgtacgtataggaataagcatggaattaaagaaaaataagaataatttaaagcaaattacggcattaattcaatatgcatttttgaaaaataatgatttgactaaagacgaaaattttatgagtcgttatgatcatagtacaggttatggctattttgataaggaaaaattagctagctatattatggttaatcgatttaaaagtgatgtttttgggcatcatttaccgatggctggaataggttatgtagcttcatatcctgagtatcgtggccaaggtcatatttcccaattaatgaaagaaattttgcatgacttacataggcaagatattccgtttgctaacctggcaccattttcggagagcttttatcgccagtacgggtttagcaatagtatttatcaaaaagaatatcgctttgatggaagcgcattgcgtagttttaaattaccacgttctggtcatatagtgcgtggcaagtgggacaatttagctgttcaaaatggtgtgattcaactttatgaacgtcaactgcatactgatgatgaacgtaacacggttgtacgtgaggcatggtggtggaatagacttgattcttattatcatcaccgcaatgtagccgtttattttgacgcggatgagcggccaattagttacttgatttatcgcattagagacaatacttttttagctgatgaaatgtacgcaattacgccgcagggattactgagtatgtttggttttatgggttcgcacgcgggcagtgttaagcaatttaaaatgagcgtaccagagaaatcgttacgagctgaactttttcctgaacaaaacgaactccaagttgatttgcgtccttatatgatgagtcgaattattgattttgaaaaagttttggcttgtatgcggccaatgcaagaaggtgattttaatctggaagtcaatagcgatgaacagtgtccttggaatattggagtttggcaattaagtaatcatggacgtaaggtagcggtagaacgtaaggaagatgcattggttgatttttcgggatcaattaccgcgtggacccaggtgctattaggtagactaaccatgaatgctgctgttaaactaggattaattacagattaccgcatcaaaaaattagatttcgttaaaggcgatgtatcattttatgattatttttagttgtgaggttaaaaaatgagtaaagaaaagaaactcaatttaataaaattatttggcattgtagttagtggtttgaatttgatcttttttgccttgatggcacttaataagcatgaagatactaaggataaaagaagagtagcagaagaaggacacgcaccgctggatgaaaaataaaatgacggaattaaagattgcatattttgaccaattaggtcgtaaggaattagatcaggcagtgcagcattttgtgttaaaacatcctaatgtagatgtaaaactacttgcgactagtcatgatggtgcttttgcaaaactgaatgaagatgaagcagacatagcaatcaatgatttgcgtgacgagaatcttaactttgatgaaacagaattgactcaagctggtgtaatggcaattttgcccaagggaatgtatcctaatggcattcaaatgattgaaaaagacgagctcaatgatatgacttgttttattgtggctaaacctgaagaagaggttagtgagctacatttatttaaagatttgtatcaaattggcagtcaattcatcgcttctaactcggtcgaagaagcagcactgttggtcgcctctaggtctggctattttattttaaatgagaatacggctaggttaattaatactacagatttgcagccacttttcttgcttgatcatggtcagttaataaagcaaaagataatggctttttataagtcaaattcagcgttaagtagtgagtttataaagctattgcagcaagaatattaatctgtaaagttaaaaatatcttgtctaagtactataagatactgtaaaatatattatgaaagcggactcatatattttacattctggagatgatttttatgctaaaaagaactttgttacctttaacatcaatggtacttgttttaggattaactggtttggctagtcaagttgagactgttgatgcttcaacttatggtaatggtgtacaggttactattccaaaaaagatgcagggtacttggtactcttatgatcgtaatgcacataatggcacaaagatcacctttactgaacatactgttaatggcaaaccaatatttacccaggaggcttcgacaattagtgattacttcaatggtagaattgctaaccagaagaactttgataaggtaacgcaaaactggatgtctggtaaaactaccaaaatgaagaatgatacattctatgagattgatccgtggattacttttgaaaattggagtctttatcgagtggtaccacaaaccattaatggtaaaaagcataacgtgctggtttattctagtagatatgatggtggtaactacttcagaagcaagaaattagctaaaaaaatgaaggactacaagtttaagaaagttaattacacgttatagttttgtgacatcccttaactaagggatgttttttactaatagacgcgataaaatttagtataataatgacaaaattaattcttggaggagaagttatgaaattaaaacaaacaccaattttgcgtttatataaactagaaactaataaagaggatcatgcaaagttcgttaaggcagggcaacataatatgcttacttctcaagaaaacgaaccaggcacattgtttatgcagacaagtcatgacgaagaaactactaattttgtagtagaatgctatcaagacgaagcaagttatgatactcatgctaattcaaagcaatttaaggattttactgacgttgctaaagatattttaactagtcgagtaaaggtagaattgtttccggaatttatttctacaaaggcagaaaaactagcagttaccggatcaaatgattatgttatttatctgactgaaattggtgtttctttaggtaagggcgatgagtttgctcatgctgtaatgaaagaaatgaaaacggcagtcgaagaagaaaaagatattttggcaatgattgcaggaactgttgccgatcaaccaaatgaatggttagctattgaagtttatcgtaataatgaagcttacaagcagcacttggaaactaagaacttcaaagagtatttgaataatacaaaatattgtgttgaaagtaagagtttacgtaagttgcaaccagatgtaattgttgaccaaggtgcaattttctaccaaccataaagaataagacgaaaagaagaccaggctatgtggagtacataacctggtctttctagttagaggggaaaagatttattaacatatattattctggtttttagtggcgatgttttacctttgctactgctggtttattaattaatactgagctgatggccattaaaccaagcgttaaaaatgatccaccaattaagagtagtttaatcaaggttctcattcctttcatcttaattgatcttataatagcgaaataatattaagaatttatatgtaaaacctaatggattagttaagaaaataaaactagaaaaaagcgcgaaactgtcaaatcttttgtgtaaatagatctttctcgtaaattgattttttaattatttatttaatcaaagtaggattctaaggtgtcctgaacctgaccaaagcctttatgaattcgattgaaataacggtcattgtagctcattgcctgaatgccaataaaagcatcaagcgactgttcagttggaaactctgccttaggcttagctttgcgcttgatcacattgttaaatgattcaatcatgttagtcgaataaattgaagctctgatctgcttgggatagttataaaagaccagcagatctggttctatgtctttcaagcttctgataacatggctgtaaaccttgccccatttggtatagaagtcatgcaggacagctgtggcttcttctttgtttgtctgttgatgcacctgtttgaattcgttcatgatcttttcacgatcgtcgacgcgtactttagcgcagatattgcgcatgacatgaaccaaacagcgttgaaaatgagctttaggataagtcctggccaaggctgttttcatgccaacaacaccatcagaaagaaaaagctcaacttgctttaagcctcgggatttcatgttttgaagcatatctgtccagacttcaatgttctcgctaggtgcaatgcagtagtcaatgacctccttgtgcccattaggcttgatgccaatggcaatatagactgcttcacgctcaaatgtttctcggcgcaaaggaaggtatgtcgcatccaaatagacgcagaaaaacttgtcgcttagcttgcgtttgtggtaagcctcaacctttggaatcatctgcttggaaatatttgatacctgagctggactgtaatggctgccatacatcttttcaattagatcggctatttccctggtggtcacgcccttggagtaaagcttgataatcatgctttccaagatatccgagtgctgcttgtagtcaggcagcgtgtgctgatgaaattgaccgttgcgatcccgaggcacttgcacttcaattgggccaaattgcgtatcaactttgcggaaataagcaccatttctagagttgccagtattccagccatttctggcatagggatcatagcccagaaaggcagtcaattcagcttctaacaagttattaacagcctgttgtagctctttgcacaataaatcatttattttgtctggattgaatagagcttgagcaaaatctttggtaaaatcattcatgaaggagttcttctttctgtatgtgtttttttgttcaaaccaatcatacgagaaaggaactcctttttctaatgtttaaagaaataaatttaaggaatcattcatccttacacaaactattttacagtctcaaaaggctggttagcacgtaaaatagaaatagagtcaaagtctagtgcaactgcgcataaaataaagcagtatcgatgggatgctgcttgttttggttaaaaaatagagaatatgcttgtagcccttttcgtaaatagcgttaatgttgtaaaatggaaagtgcattaagtttattaatgagaaaattgatgtattattgcaaaataggccgtaatggccctttttgttgtgaaaaaattaaaagaatataggattggaaatgccaggaatagtagagcaaacattattagaacaacaaaatattgatttaaatgaaatggtaacaatgaatcaaatgattgatcaattgttgcctaatgcaagtaaagaattacaacaaaaactaaagattaaaatttataactttgtgcgtacacgtaaacaaccaagtattactgtgcgaagaagaaaatattttaagccggctgttgctaaattaattattggtaatgtacaagattacgcagatgcaattgaacgtcgtgctaaggaagccccagctaaagaggatgctactgataagaggccagcttctaaatctaagcgggttaagacaattactaagcgtaagattttagctaaagttataaagaatgataagattgataaatctattcaaaagaaattagaggataagattgcttcaattgtgaagaccaactttattaagccagttaacaagcggggaagtttttcggttgaagatggtgaaaaagttatagctgaacttagtcctttttatcaaaatatcaagattgatcaaaagtatcgcaagaatgctgaaaaagcggctgaaaataaggaaacagaaactaaagaaaagcctgagcaacattctaaggatcagaatgaaagtcgtgaaggtcaatctaaggactttgagcgtaagaataatcagaagaatagcaataatcgaaataataataatcaaacgcaaaatcaacgtaagcgacaaaataagcatccttttgagatcagaagagaaaataataaccgctcacgtaataatcagtctaaccgccgctataataatcgaaataattatgataatcggaataattatgaatttgatgaagctagcggtttgcgtgaacgctacaatacagtaatcagaaattacaatcaactggagcaaagatataatgctttgcaagataaatataatcaggctttagatgataaagctagattgatcgaagaaatgggtaagaagaacgaagacttacgtcgtgtattgatcgacgttttgcgaaaaatgtagtttttggtaaacaaagagactagtagtcaatttgaattgattactagtcttattttatgtttatgaaatatgatttagcttaaaaattaaaaaaatatgtgtaaaaaattatttttgcgtagtaagattaaaggatgataaatatttttattaatgattaatggaggagaagtatgagtttaaaagagctatttaaaagcaatgtgtttcgaggaaactgtcaaatcttttgtgtaaatagatttttctcgtagattgattttttaatcttttatttaatcaaagtaggattctaaggtatcctgaacctgaccgaagcctttgtggattcgattgaaatagcgttcgttgtagctcattgcttgaatgccaataaaagtatcaagcgactgttcatttggaaactctgctttaggtttagctttacgcttgataacgttgttaaaggattcgatcatattggtggagtaaattgaagccctgatctgcttaggatagctgtaaaagaccagcagatcaggctcaatctctttgagatctctgatgacatggttgtacgctctgttccacttgtcatagaaggcgtgcaagactttgatcgcagcttctttatttggctgttgatggatttgcttgaattcattcatgatcttttcacgatcgtcgacgcgtactttagcgcagatattgcgcatgacatgaaccaaacagcgttgaaaatgagctttaggataagtcctggccaaggctgttttcatgccaacaacaccatcagaaagaaaaagctcaacttgctttaagcctcgggatttcatgttttgaagcatatctgtccagacttcaatgttctcgctaggtgcaatgcagtagtcaatgacctccttgtgcccattaggcttgatgccaatggcaatatagactgcttcacgctcaaatgtttctcggcgcaaaggaaggtatgtcgcatccaaatagacgcagaaaaacttgtcgcttagcttgcgtttgtggtaagcctcaacctttggaatcatctgcttggaaatatttgatacctgagctggactgtaatggctgccatacatcttttcaattagatcggctatttccctggtggtcacgcccttggagtaaagcttgataatcatgctttccaagatatccgagtgctgcttgtagccaggcagcgtgtgctgatgaaattgaccgttgcgatcccgaggcacttgcacttcaattgggccaaattgcgtatcaactttgcggaaataagcaccatttctagagttgccagtattccagccatttctggcatagggatcatagcccagaaaggcagtcaattcagcttctaacaagttattaacagcctgttgtagctctttgcgcaataaatcatttattttgtctggattgaatagagcttgagcaaaatctttggtaaaatcattcatgaaggagttcttctttctgtatgtgtttttttgttcaaaccaatcatacgagaaaggaactcctttttctaatgtttaaagaaataaatttaaggaatcattcatccttacacaaactattttacagtctcgtttcgagcctgcattattatcttattgtatgttttatacgcattatttgggagttttagtgaatatttatttaaatatgctctgaattcaattactgctggtaattttaatacatatgtttattggcaaataatgcagtttgttttagcattattcacttcgttgcttttaccaattactaccgttgttttcactaggcagacgcaaaactatctgcataaaattcggcaagaaatcatgcatcattactattatgaaaaaagtgatgaaaaagtctctagtatgcagaaccgattaacagccaatttaaaaatcttatcagatgattatgctacaccttggattactatcttaagtggggttttagagattgtgattgctattgttttactagcaagcatgaactggattctaattttggttactgccattttagctgtgattacactttttgctcctaaaattatggagaagaaaacatcagctgccacagataaagtaaataaaaagaatgaaaagctgttaaatacaattgctcattggcttggtggattgcaggaactacgtcgttatagtgcatacagtcgtttggttaagcaaattcatcgatcaagtagtgattatgtggacgcaagtaagggtagtgcaaaattaagaagtgtaagttatttgattaatgcttttagcaattcaattgcacaaattggtatgagctttattgctggaatcatatttttgcttaatatgatttcattcggtgattttgcagttgctagtggttttgcatttacgattttttcagcaatttggaatattactcagtcgttaacgcaagttaagtcaactaaggctttacgcgaacagattaccgatttaagaaagcaagttcctgatgaaaataaagataaagtatcagcctacggtcttaaagtttcaggcttgtctgtaaaatacgatcagggggaaacaattttttatcctgattttacaataaaaaaagggcagaaagttttgcttactggcgattcaggaacaggaaaatcaaccttgtttaatgttttgttaggtaagctaaaacctgaatctggtacggtgacctatctagatgaaaatgaaactatcattcctgaaggaaaagctagaattggcaatatgccgcaaaatccagtagtttttcccgcaacgatcaaagagaacattacaatgtttaacgaaaatttgcaggataagcttcaagatgttgttcaagcagttcaactccaatccgacttagccaaaatgccagatggtgttaatacaacaattgatctaaaaagtgaaaatttgtctggtggacaacggcaaaaagttgttttagcgcgaacggaaatacacgagcaatcgtttgttttaatggatgaagtaactagtgcgatcgatcaaaaagctaccgaaaaaatcattgatgaattgctcaaaacagatcaaactattttgatgattgctcacaactttacgccagaattaaaagcaaaatttgatcaagaaattaaattaaaaagtaagaaaggggataaagtaagatgaatttgaaagcttttattaaaaccaatccagttcgtttctggttaactgcaattggttggattattattcctgctttatcaattaccaatacttacgttgtacaagaagagacgaatatccttttaagtcgtaattggactaagtttattttaatcaatgttcttgcttttctgattatgttagttgactatggtgtgagtgctttagttgattatcagcagcaggctcaggtacaagacttaaatgatcaagttagagataaaattgttaagcgatattattatgacgggaaaaagcatactgttgcacagatgcatagactgtaaaatagtttgtgtaaggatgaatgattccttaaatttatttctttaaacattagaaaaaggagttcctttctcgtatgattggtttgaacaaaaaaacacatacagaaagaagaactccttcatgaatgattttaccaaagattttgctcaagctctattcaatccagacaaaataaatgatttattgcgcaaagagctacaacaggctgttaataacttgttagaagctgaattgactgcctttctgggctatgatccctatgccagaaatggctggaatactggcaactctagaaatggtgcttatttccgcaaagttgatacgcaatttggcccaattgaagtgcaagtgcctcgggatcgcaacggtcaatttcatcagcacacgctgcctggctacaagcagcactcggatatcttggaaagcatgattatcaagctttactccaagggcgtgaccaccagggaaatagccgatctaattgaaaagatgtatggcagccattacagtccagctcaggtatcaaatatttccaagcagatgattccaaaggttgaggcttaccacaaacgcaagctaagcgacaagtttttctgcgtctatttggatgcgacataccttcctttgcgccgagaaacatttgagcgtgaagcagtctatattgccattggcatcaagcctaatgggcacaaggaggtcattgactactgcattgcgcctagcgagaacattgaagtctggacagatatgcttcaaaacatgaaatcccgaggcttaaagcaagttgagctttttctttctgatggtgttgttggcatgaaaacagccttggccaggacttatcctaaagctcattttcaacgctgtttggttcatgtcatgcgcaatatctgcgctaaagtacgcgtcgacgatcgtgaaaagatcatgaacgaattcaaacaggtgcatcaacagacaaacaaagaagaagccacagctgtcctgcatgacttctataccaaatggggcaaggtttacagccatgttatcagaagcttgaaagacatagaaccagatctgctggtcttttataactatcccaagcagatcagagcttcaatttattcgactaacatgattgaatcatttaacaatgtgatcaagcgcaaagctaagcctaaggcagagtttccaactgaacagtcgcttgatgcttttattggcattcaggcaatgagctacaatgaccgttatttcaatcgaattcataaaggctttggtcaggttcaggacaccttagaatcctactttgattaaataaataattaaaaaatcaatttacgagaaagaactatttacacaaaagatttgacagtttcgtaatcgggactttctgtattgaaaaaatgaagagataatttgttattgatctcaatttttaaatcttttttgttaacggtaagcgtataacagtgtcgtttgcagataaaaccatttcttaataaaaaatctacgattggattttcatttgaatcaatcatgacttgcaatgcttggtgctctgcttgaactatttttgaaaatggaatatttacagagtaatcacttagattgaattttagataaatatatttgttatgaaaaagattgtgataagtagaaatagtgcctagatgcttatcgttatcagttactttgtagattttaggagatattttttcaatttttgtagtcattttttatccttttgataattgaaattaatttttgatcggttccgtttttaattatgaagttataaatcggttcataattgagcacagggaaaataagatcaggatcaattttaggtataatgtcaatcattgatttcttactaattacgttgagatttttaacttcttgagcatttcttatctttctttttgcttgtgaaggaggataaccttgtccccaaggctgttcaaaaagattttttatagtctgctcaaaattgatttcaccactccaaccccaattaagtcctagtggaaaggagacaacattgccgttattgatatgaccaaaaagaaaagcatcttgtggagtggggatataaccacattgaatattaggaaaagtatttcatgcaagcatcattccttgtccagaagtacatcctgtcacaatgaagtcagtcgccttgctattaattaataatgcgacagctagggaaacttgcacgtaagatagactagccgaactatcttgataaataccaaaattgaatacttgatcattggatcctacagattctttgatatacttctctaatatgaaatttttacttttttgcgatgtagcttgaataatacctattttcatatttttaacctctatagtttatttttgaaagcgctttataatattatataggaagtaaagtaagaaggtgaacgtgatgaaaaaaattattgttggaactcctgttaaattgagccatgttttaatcggtatgattgtggtagttttactttcactatttttgacaggatttggttatcaagcttggtggctattccttattgtactaattttaggtgtatttgtaactttacctacttgttttaatccgtattggcagattagtagcgaaaatattacaattataaattatgatattaacgatgtgataaaattgatgcaactgctagggttacataaaaagagtaagcaagttattaatttatctgatgtaaagaaagctgccgttgtctatcgtaaaaatgtacgtcttagtcctattgactttaatcctgattatttaaatttgattttggatttaggtaagggaacaaatatgactttgacacttggaaatgtcgactatcagcaactaaattcgattatgggtttgttacaagataagaatattgtagtagatgataaacaaaatattttgcaacttttaagagaaaataaaaacttgtttaaccattttcacaagaaaggctggacatcgctataaatggataaagagcaaataattagaaattattttcgagcatggctaagtcctaatcttgaagtagtccaaaatacatttgacgaaaatgctatttatagtgaatgctatggtccagtttacagaaataaaaaggagataatatcttggtttgaaaattggaataaacaaggaaaagtaattgcttggccaatagaaagactcataattaatggtgatacgagcattgccgaatggcattttaaatgtaattatcaaggaaaaattagtgaattcgatggtgtatcaattatagaatttaatgatcaaaataagataatttctgtaaaagaatatcaatcaaagtccaaacattattatccctatagtaaataagacttttaactgttaagaggttaaaagtcttattttgaatatgaaatcttttataaactaatttctgtggaaaaaattaccaagccagcttcgtttctttttagcctcttcttttcgtcgctgttcacgatcttctaacattgccttagctagcatatcaactgtttgagtcaattgtgcttggttatctctttgttgcttatctctaaatgaactactgttttgatacttattcattaacgtatcatcatcaagccatttatcaaagttttcaacatcaataataaaaccggtgctagtttgttgcgatgcaatgtgatattttctaggcaaatatttaaagtagcgatcaagcatagtagaaccgctgtttttcgccgtttgatcggagattttattgaaaagttctttattgatttgggcttttagccggtcatcttgtttaataaataagatatcgcttccgatttttgcttgattgattaacattccccaatcatttcgaccaacaaatagggagtaatcgtaattttcttcaaaatatttgctgacttggttatacatatcaaatttatcaagtgcagtttttaaaacatgcttgattggatataagaagtctctttcaatcttctgcgcatcttcaacactaacgttagtaaagaattttgctaattcaacttgacaatatttaaaaagatcatcatttgcacgactaaataagctagttaatgcagcattacgttgatcactttcacctgaaaaagtagattcaaagcttaaataccataaacgacgcataatttcaggctttagagaaaattgtgatttaatagagctttcttgtctattcatcgtgaaaatgaatgctggtgagggatgagttaaattacgattgttagtaacttccttgatgaatctttcaaagtaagtacgggttgtaagctcgggactgacatcatcaatcattaatggacttacaggaccatttgtatatacatagtcacttagcgtgttggtaattgtcatattgatattactcttgccaagggcataattctttggatccatcattccactatctaagaaattatgagcaccaattaatttagcggctagtcttttccctagggtggacttaccagttcgaccttgtccgattagtgctgtagcaataggcacgtcttctctagatacattgcttccagataattcatataaattgcggattttccaaagccatggtgattcatatagaaacagcataaagtcacaagcttgccagccttcaccaacttctttgtaagtattatattcatgagtgatatcacagaaaagttgaagcgcattttttaattgcccttcagttaaatcagaagtaataacttcagaagggatgttatcaccaattttagaggcttggaataattgaccattattgtaaaactgaacaggaacagggaagagatcttcttctttttcaatttgtgatgtatctgcttttgcctttttgtcttgacgaataatgtgctgagtcaagctatataaatcttgcccgattgtatctagcttacgtcttttattgccaccttcaccaaataaagtaactgtttgagaagcaacgagtttttcattttcagataatttctttaattcatcatctttgctgtagtggtcgcgatacttttttatctcttcagctgggagaataattatgtctttaccagttgaattaggactgtttttgatttcaagagaagaatcttgcattacatgaatgcgaagatcgtctttatttttgtcttctaaataaccagatagttttttagcattaatataagttgtagcctgattaaggttatcttgaaacatttgttgatagcaattgaataatggatcagaagtattgccgtaatcccaaactaattgttccatatttttattaacagccgtatcggtaagattcattgaacctgaaaaggcagagtacttgctttgattttccattaaataaagcttagtgtgaatcaaattctgtttggtgaaaaaaagctgtaaactaccatctaaaatacgtttagtgaagggactatcttggtgttcgtagctatattcaatcaaatcacgacgtttatttaaaatttggtcaattcttttgccaattgaatttgatccattatcggttagtccaagaattagtgtgatctggtcaaaacgtggtataagattttgctcaataaatttaatattagaaacaaaggaaacgcctttaaactcagagaatttatttgactctctttgaaaatcaactaattgccaaaaatcggcattggaaattagtttttgatcagtatgatttagtatttctaatcccatataaaatcctttcgtgagtatacaaacatttgcttttagtgtatcgtgaaaaattggattagagcaaggaaaagttaatttattattgaatttatgaattagattaagtaaaatctgattcaaataacggaagtaaaaatataataatacgcgtggtgctagttaaatcgttttagttaataaaaaagtccaatcggactagactcaagttgtagtatcaaaaagaaaagagtctgatctgattgaactgccttaagcttaagcgttttagccaccatttacaagttagttttaaagatttagtgataatttgtcggcactggtatcgtttgtatgcaccggctgagtttactcatcggcgaaatattgatcaaattaaaactacggacagtctgattttggctttacttatctggcaagctaagacaggaattgaatcacaaagaagattctgtgaatgtttcaattgtttatcacactcacgttttaatcggcgttcacgtcagctattgcaattgatttatcagatacggcaagaaatgaataaaaaggttgacctgaatggacatttcttgatcattgacagctttccggtacctgtttgccaaccaattcgcaactatcgtgctaaaatttttcgcggttatgccaacattggttataaggccaccaagaaaatttacttctatggtttcaaagttcatgccattgttagcgatgacggttccattcttgattatgtcgtaacaaaagcatcagttcatgatgccaaggagacagttgaactgctggaaaatgcccatccatctaattactatcttcttggcgacgaaggctatttaggcaaagaactgcatcaacagctaaaacaaatgggttatgaactttggacaccatatcgtaaaaatatgacaggagctaaaaagcacaatgatcatcaattgatggctattcgcagaacaattgaaagcgacttttcgcttctgacctattacaatgccgagaacaatcgagcacgtagtctgataggctttcaaagccggttggaaattgcaattttagcttataatttggcttattgtctagaacgatttaactagcaccacgcgtataataatatgttatcggaaactgtcaaatcttttgtgtaaatagttctttctcgcaaattgattttttaattatttattcaaaataagattctaaggtatcctgaacctgaccaaagcctttatgaattcggttgaaatagcggtcattgtagctcattgcctggatgccaataaatgcatcaagcgactgttcagttggaaattctgccttaggcttagctttacgcttgatgacgttgttaaaggattcaatcatattggttgaataaattgaagctctgatttgtttgggataattgtagaagaccagcagatcgggctcaatttccttcaaacctttgatgacattgctataagctttattccatctggcatagaatttgtgcaagacagctgcagcttcttttttgcttgtctgttgatgtatctgcttgaattcgttcatgatcttttcgcggtcatccacccggactttagcacagatattgcgcatgacatgaaccaagcagcgttgaaaatgagctttaggataagtcctggccaaggctgttttcatgccaacaacaccatcagaaagaaagagttcaacttgcttcaagcctcgggatttcatgttttgaagcatatctgtccagacttcaatgttctcgctaggtgcaatgcagtagtcaatgacctccttgtgcccattaggcttgatgccaatggcaatatagactgcttcacgctcaaatgtttctcggcgcaaaggaaggtatgtcgcatccaaatagacgcagaaaaacttgtcgcttagcttgcgtttgtggtaagcctcaacctttggaatcatctgcttggaaatatttgatacctgagctggactgtaatggctgccatacatcttttcaattagatcggctatttccctggtggtcacgcccttggagtagagcttgataatcgtgctttccaaaacatcagagtgctgcttgtagtcaggcagcgtgtgctgatgaaattgaccgttgcgatcccgaggcacttgcacttcaattgggccaaattgcgtatcaactttgcggaaataagcaccatttctagagttgccagtattccagccatttctggcatagggatcatagcccagaaaggcagtcaattcagcttctaacaagttattaacagcctgttgtagctctttgcgcaataaatcatttattttgtctggattgaatagagcttgagcaaaatctttggtaaaatcattcatgaaggagttcttctttctgtatgtgtttttttgttcaaaccaatcatacgagaaaggaactcctttttctaatgtttaaagaaataaatttaaggaatcattcatccttacacaaactattttacagtctctgttatcgctttggagaaaattatgacaacagtatattttgtaagacatgctcaacctgatttatcagttcatgatgatttaacacgtcctttgacagaaaaggggttgcaagatagaaaaaaagtaactgattactttagagataaacacatcgaccaagctttttctagtccattcaagcgtgcaattgatacaattcaaccagttatagacgagaagaaactaacattatcatctatttctgactttagagaaagaaaaattggtgatgagtggatttctaattttcatgaatattgtgaaagacagtgggaagattttgattataagctaagaaatggcgagtctttaaaagagacgcagaagagaaatgttgctgctttgaagctagttttgtccaaatatcaagatcaaactatgattattggtggacatggtacagcaattggatcagtaattaattactatgatccaagctttaaatatgaagcctttgctatgatccagccaaagaatccatttattgtgaaaatgaactttgatggagaaaaatatttggagtataaagtagttactttttagtaaaaagataatctcataaagtaaaaatggtaaatcaaggtactaataaccagatttaccatttttttatttgttatattatagcttatgttaaattttatcctgagcaatgaaattatcataaatggttttgataactacttcttcatcttgccgtctggtaccaatcataattgagatttgggatgcaccctggttaatcatttgaatggagatgttctttttaccaagagggtaaagcaagctagcacataaagtcagcttgtccttcatcccttcacctaccaccattgtgattgcataatcatcaatccactgcatttgatcaggatttagactagtttgaatttcattacagataacatcaattaattgatcagttaagacatcttttttgaaaataatggtaatatcatcaattccagatggcatatgttcatatgaaacatgatgtttttgcaaaatttccattaacttcaaggtgaaaccagcacctttatttaacatatattttcttaaataaagggccgcgaagtttttgcctccggcaatacctgtgattgtgtgtttaggtataaagccgtcctctggtacgatcattgtcccaggtttttctggagcattagtatttttaacattgacaggaatttcgccttgaatagcaggaattaaggcttcatcgtgaaagacggaaaatcccgcataagatagttcccgcatttcttgataagtcattcttttaattggcttgggctgatcaacgatatggggattggctgaaaaaatagcatcgacatcggtgaagttttcataaagatcagcgtttaaccccctagctagaatagcaccggtaatgtcagaaccaccgcgagagaaagtagcaatatgtcctgatggtgtaatgccatagaagccaggaaaaatgatcttttcatcttttgcagccttaattctttttaagttcacataagtttcaggattgacttcagcattattagaagtgccagtgacaattaaacctacatcttttggctctaaaaatcgtgctttaattccttgatgatttaaaattttagcaatcaaaattgcattaagacgttctccgtgtgctttaaaggttgccatgcggtagtcattattagggtaacttagcttcggcaatgtaagtagaagctggttaatatcctctaattctgcttcaggcagctcaaaatattgggcaattaattcataacgcttaaaaatacgggtagcgatgtcttgataattattactcctcaagctcatatatgcgtaagtgatcattagatcggttactttaatatcatcctcagttcttttgcccggtgctgagactacaacgacttgtctttcgggatcggcattaataatacttagggccttatctccgctattacctgaggctagggaagaacctccaaatttaacaactttcatatctatttttccttaattattatttcaaatctaaaattgaactgatttctttttccatatcatttggttcaataattttttcggtcttgggttcacgatcaaaaagggcacgcacaccgattgataattgaccgcctaattcatcatgcaattctttaattgcaccgacgccagtttgcatactaggaccaccagtgatggcttcatacaccgtttctgggaacttatatggactggctgttgaaacaatgaccattggggtttgatcgccggtcttcttttgatattgatttgctacaaaagagccaacagcagtatgtggatcaattacatagcggtcataattgtagacccgtttgatttctgatttaacctcttcttctgttgcaaaaccagctgcaaaatttttttgtaatttagtgaaaacttcaccgctaacttgataatgaccgcgttgagtcaattgattcattaaactagcgacttcatagttattttcgccataaaggtcaaataaaagtcgttccaaattgctggaaactaggatatccattgctggtgcattggttaaatggaacttacgtcgcttatcgtagacaccattattaaagaaatcagtcaatacattgttttcattagatgcacaaatcaactttttaataggcaaacctaatttcttagcataatatccagctaggatgtcaccaaagttacctgttggcacagcaaagttaacttcgtctcctagtttaatttcttgtctgcgtactaattgtccataggtgtagaggtagtaagaaatttgcggaaccagacgaccaatattcatcgaattagctgaagaaaattgatagccattagcattaagtcggtttttgaaagaatcattgttgaagatttttttaacttcagtttgagcatcgtcaaagttacctttgattgcaattgcacgcaaattgttgccgcgttggctgagcatttgcttaagttgaacaggactaacgccaccttcaggataaaagactatgacatcggtacccttttgattagcaaagccacgcattgatgccgtaccagtatcgccagaagtagcggttaaaataataatatctttatcaatcttttcaatttgaacagctctggtcattaattgtggcaacatttgcaaagctatatctttgaaggcaagggtaggaccgtgaaaaagctccatgtaaaaatggttatcgtgcttttcgattggaacaatgctgcgatcatcccattgttcactataagcgctttgaactgcagtggtgatttgctccttagtaaagtcatcaaagaataagctaataaccatggcagcgatttgcttgtaggaaagtttggataaatcttctaacttaaaattagcttgaggaaaggcaacaggcacgtaaagcccaccgtcttgagccaagccttgaataattgcttgaggtgcagttaaagtgttttcttttgaacctctagtactacgatattgcataaacaatcttcctatcttatgaaatattaatattataactattgtaccttgattagcacctatgatacaatcgtaaaaataagaaaatcattaaaaagaggataagatcaaatggccatcaaaattgcattgcttggattaggaacagttggttcaggtgttttaaaaataattaaaaataataaaaagaagattagacaaacaagtggtgaagaaatcatcattgaaaaagctctagtacgtaatccagaaaaacatcgtaatttagctaacgaagtgatgctaactacagatttcgattcgattttgcaagatcccgaaattaaaattatagttgaattaataggtgggcttcatcctgctaaggaatatattactgcagcaatcaatgctggaaaaaatgtagttacggccaataaagacttaatggcaacttttggttcagaattgattaatttagctgcaagtaaaaagtgtgatttaatgtatgatgctagcgttgcaggtgggatccctattttgcggaccttggctacctcttattccagtgacattatttccgaaattcaaggaattattaatggtacgacgaattatattttgtcacaaatgggggaaaagggactaagctacgaggaagcgctgaaaaatgctcaagagctgggctttgcggaggctgatcccactaacgatgttacaggtaaggatgcagcatacaagattgtaattttaagcaagtttgcttttggtactaagattagtattgatgattttactattcaagggattaataatctaaaggattttgacattaaacaggctcagaagttaggctatgtcattaagctgattgggattgccaaaaatattaatggtaaattatttgtagaagttgctccatgtttgttgccagaaaatgcgattatggcgcatattaaaaatgaactaaatgctttacaaattaagagccaaagcctaggaacagcagtattcacaggcccaggtgcgggtagctctgcaacggctaattcagtcatgagtgatgtgattactgaaataaaaaacgtagtgaaaaagaccaccggtcagccatttagtaatttctcccatgttatgcaattaacaagttcggaggatgtgaagtattcctattatttatctttcgaagcagaagagaccttgtttgatttgagtaaattactctctgatttggaaattccggttcgtgagattaaacaagtacaatcaagaattgtagttgtaaccgaaaatattagtcgacagcagctacaagatttagcgattcaagatcaatatttaaaagctagctataagattttgcagtaaaggaagggaaaaaatgattattaaagcaccagcttcaacggcaaacttgggtcctggctttgattcacttggcatggctgtttcactttatttggaagtagaagttttaagcttagccgatcgctttcaggtggatcatgtgatgaaaggaattccacatgatgaaaaaaatttaattgttaagactgcactaacagtttatccagggttaccaccgcttcatttacgcgttaaaagcaatatcccattggctcatggtttaggtagcagttcaagtgctatcgcagccggaattgaattggctaatcaaattggtaagctgggactatcagatgaagaaaaggttcaattaggagctaaaatcgagggacatcctgataatattgcaccgactattttgggcggcttggttgttggtgctgaagttaaccatcattttgatgcagttgaagcaccacttcctccatatgcgttggtggcttatgtacccgattataatttggaaactaagacagctagagcagttttgcctaaagaattagcttttggcgtagctacgcatggctcagcagttgctaatactttaattgctagtttgtttgctcaagactaccctaaagcaggagaattaatggaacaagatgtattccatgaagtttaccgagaaaaactagtgccagaacttgtaaaagtgcgggaggtagctcattcaaaacatgccttggcaacttatttgagcggcgcaggttcaacgattatgacgtggattgaagataaacatgtagctggatttttgtcgggcttacgtaaacatgatttaaaagatgagacattaatcttacatcctgatgaacacggtgttcaaattatccaataaaaagactgaccaagcggtcagttttttagtcgtcaaaggttgcagcaaaactatcaccatcgattagcattcttttagcattgacagcataccaataaggaataacttcagtgccattttcttgctctaattcacagtcggccatttttaaaatttggtctaaatttttagcactgatgttagggtagagcttcagtaaagcttcttgagtaatgccactttgtttaaagccactagtgggataattggcagaaaaaatatcagaaaaatcatctaagtcatatctaggcttaaattctccatcaaagtatttgatttcgatgttttcaatttccataaaggcaccaagttgttttgccatgtaagggaacttattagctagttgttcaacagtaaaaccattgtttgctttagttcgtgcattgggatccagtttaaaccaagcttcacgtatattatgactatcttttctttcaataagaaggtctttgactttttgaatagctgcattgtgtctgtttacggctttttgccagtctaatcgattaggatataactgtctatagcggacagacaagggatgatcgattgcgttgtagataaaattcagcttgtcagtggtataagaagttagttcatcgtcacgccacattaattcatagtaagaactcatgaaagacacctttctatttggatagactaattaatattaactgaatagtatcattttttgctccgattaacaaaagtgataaaaatgtctatttagattggtcagcagcaaaacttttgttaaaattaatgtgtttactattagtatttgctcaaaggatttgacaaactatggatcaacttgataagttcaaccgacgctacaattttctttcaaaattgtcagctgccttcttttattcaattgcggttgcagttgccttgaactttttttggacgccggggcatatgtactcgtcaggaatcacgggttttgcgcaattaattaatactgtaagtgaaagatatctaccgtttacattatcaacatcaatgatgtactttcttttgaactttcctttatttatattggcttggttcaagataggacataaatttactttcttcaccatcgttgctgttgttctaggttctatcatgatgcacgctattcaaccttggcagatgcacctggacccactggtttgtgcgatttttggtgcttcgatcaacggtattggaactgggatggcattaaagaacggtatttcaactggtggactcgacattattggtattgtaattaggcaaaaaacgggcattagttacggaaaatttaatatttttattaatttgattattatcgctgctgcgggatacatgtttggttggccacgtgctctttattccgccttgactatttttattaatgggcgagtaattgatgcggtttatacccaacaccagaagatgcaagtaatgattgttactcagcacccacagcatattatcgatggtattcaaaaccggatgcatagaggaattaccattttgcatgatgctgaaggtgcatacagtcatattgaaaagacagttttgattaccattattgatcgatatgatatgtatgatattcgccaaatcgtgcaaggagcagatccgtatgctttcatgagtgttagtgaagttgaaaaagtatatggtcgcttcaaggagcaagaaatcgtttaatggatagcccttaaaccttgatatataaggatttataaatgaaatttgaatcctaggggcactttgggagcaaaactattcaaaaagaagcagaaatgcttcttttttatttggagtggctttttgtaattatggctttattattggtctttgttaaaagtgattaaaaatgatattatttcgattgagggatgttgatatatcgtggatcatttagtgtattctccacgagtgtggaggtgatcctatcatcttgaagggcacgggagacaaggcagagtattctccacacatgtggaggtgatcctactgttaacggtgatgactggtatccagttagcgtattctccacgtgtgtggaggtgatcctactttgagctgtgtcaacgccacagccgtttagtattctccacacatgtggaggtgatccaagtcgttacatcagccaaaagatgaggcttaagtattctccacacatgtggaggctaaatagctgctctgaaaaatatgttctatagagtgactgtttttgtatattatttaaaaatattgttgatggtgcacggagattgcgttcacttatatagtgaaaagatgctaagaaatctaaaatagaatcgagatgaattggtaatctggtaatcgtaagaaggacttagctactaatcgttgtattcaattttgataacaaattaattaaagagcaaaaaatatgaagaattataaatttaataagtttatgtaaaaacagtgtcattaagttaggctattgattttggtgaaaaaacaattaaagcatcatttggctttagacggccagattgatgccctttttggcatatttttctaaatatcattcgcgttacacgtaaaagcgtgtgttgtatatagtgaaaggaggctaagagaatcggagctaagaggtgacaaatatgccgaaagcctataaaattaactcatactggcaaaaatactaaatggtcattaaagttctatcctaaaagagctttgttaactggtgttttgattgtgattgctatagcattatggaaagtgatttttaatggctaaatatacagaagtaaataaaaagtggaatgataaaaatgaggcccgtaagctttacattaataagaggtcaacgacgaaaaactttattttaaatcttgctatcgaagatgatttagaacagattgaaaaggatattgaagaaagacgcaataatttgtaaagaaataaaatgggatacatcaggtaataaaaagtgcatctcatttttatttgtatataatactagttaacttaaaaaagcaataaaattcaaataaaatggaggtatttcaaagaatgacagagaataataaacaagccaaaaccactgataccaaggcaaaacccaacaacgacacagcaatcttcgctggcggttgtttttggtgcatggtcgaacctttcgatacagttgacggagtagaaaaagtagtttctggttatactggtggtcatgttgctaatccaacatatgagcaagtctgttcaggtacgactggccatactgaagctgttgagattacctttgatccagcaaaaatatcgtatgatcaattgctaaactattattggcaagtgactgatcccacagatgcaatggggcaattccaagatcgtggtgataattatcgacctgtaattttttataattcacctgctcaaaaagaagcagctgaaaaatctaagcaaagattacaagctagtggtaaatttgataaaccaatcgtaactaaaattgaaccagctaagccattttatccagctgaggaatatcaccaagatttttataaaaaagatccacttagatatgcaatggaagaagctggtggaagagctaagtttatcaaggaacattgggattaataaaaagcagatcataactgttataagctgtgacctgcttttttactttcaatattttagattatgttaactatttctttaagttgcttttgataacctcgattggattgagccaagttccgttgttaacgttccaattcttacatggaaaaccatatttgtttatgtaatctttatttgtttgagtaacgccaaggtgtaagtgtgagccagttagcttaccgatcttttgatctaatttaatcttttgaccagtcttaacataaatgtcttttttcttattaaacccttcttggtaaacttcaacgtaattatcaggactaataacccagatgaaccagccaaggccgttgccataagcaacctttttaacagtaccttgatgaattgcatatacgttagaatgcccaacttctgaaaaaccaaaatcccaaccatcatgaaagtaggaaggtggtgtagtagaacgcatatagttagttatgccaaaagtttgtgcattatacattggacgaacaccatttttcttgttggctttaaacggataagcccacttgaggttcttgggttgaacttcagttgtattttgtgagtcatcaagcgtatcagcagaagcagtggtggttgataaaccaacgcttgaagttaataatgcagtacctaacaaagaaattattaatttacgaaatttcattataaaaagaaaccagataagttctgatttttatctcctctcttaattcacctaaactattgtagctcagcagttttacgagaaagttacaattaaatttcgattaataacaaaaagttagtatgagtatatgtgaatatgtttttaattacgagtctaggtatttttgaaatttctttactttattttgggatttacatagaattaaattaataacgtttacattgaatttagtaaatgatagtagacattaattgggctcaaaaataataatttggacgaaactgtcaaatcttttgtgtaaatagatctttctcgtaaattgattttttaattatttatttaatcaaagtaggattctaaggtgtcctgaacctgaccaaagcctttatgaattcgattgaaataacggtcattgtagctcattgcctgaatgccaataaaagcatcaagcgactgttcagttggaaactctgccttaggcttagctttgcgcttgatcacattgttaaatgattcaatcatgttagtcgaataaattgaagctctgatctgcttgggatagttataaaagaccagcagatctggttctatgtctttcaagcttctgataacatggctgtaaaccttgccccatttggtatagaagtcatgcaggacagctgtggcttcttctttgtttgtctgttgatgcacctgtttgaattcgttcatgatcttttcacgatcgtcgacgcgtactttagcgcagatattgcgcatgacatgaaccaaacagcgttgaaaatgagctttaggataagtcctggccaaggctgttttcatgccaacaacaccatcagaaagaaaaagctcaacttgctttaagcctcgggatttcatgttttgaagcatatctgtccagacttcaatgttctcgctaggtgcaatgcagtagtcaatgacctccttgtgcccattaggcttgatgccaatggcaatatagactgcttcacgctcaaatgtttctcggcgcaaaggaaggtatgtcgcatccaaatagacgcagaaaaacttgtcgcttagcttgcgcttgtgataagcctcaatcttggggagcatctgcttggaaatatttgatacttgagctggactataatgactgccatacattttctcaatcaagtcagcgatttctctggtagttacgcctttggagtatagcttgataatcgtgctttccaaaacatcagagtgctgcttgtagtcaggcagcgtgtgctgatgaaattgaccgttgcgatcccgaggcacttgcacttcaattgggccaaattgcgtatcaactttgcggaaataagcaccatttctagagttgccagtattccagccatttctggcatagggatcatagcccagaaaggcagtcaattcagcttctaacaagttattaacagcctgttgtagctctttgcgcaataaatcatttattttgtctggattgaatagagcttgagcaaaatctttggtaaaatcattcatgaaggagttcttctttctgtatgtgttttttgttcaaaccaatcatacgagaaaggaactcctttttctaatgtttaaagaaataaatttaaggaatcattcatccttacacaaactattttacagtctcatttggacaatgaaagtagagaataataatgacgaagttaaataatgaatatatggttggtctagatattggtactaattcatgtgggtgggttgctactgattttgataataatatattaaaaatgcatggaaaaagagcacttggctcgcacttgtttgatgaaggcgtatcagctgctgatagacgagcttttagaactactaggaggcgtataaagcgaagaaaatggcgtcttaaattgttggaagaaatttttgatgaagaaatggcaaaggtagatccaaatttctttgctcgtttaaaagagtcaggactttctccattggacacaaggaaaaatgtgtcttcaattgtctttccaactaaaaaaatggataaacaattttataaaaaatttccaactatttatcatttaagaaacgctttaatgaaacaggataagaagtttgatcttcgggctatttatattgccattcatcatatcgtgaaatatcgaggaaattttttgtctaattcatccataagtaattttagtgcgtcaaagattgaaatcgataggtttgtaaatgaactaaacgatctttattccatatttctgccagaaagtggagtgatttttgatgcaggaaatgcttcaaaagttgaagacattattcgaaatgaacaaatgtttaaactggataagataaaagaaattgctgatgtgttacccgacactgaaaataagtctggtctaaaactaagtaaaaaaatttcaaaagaaattagcaaagcaattttaggatacaaagcaaaatttgaaattattttacaagtaaatgtagacaagactgacagctcaatttggaattttaaattaaatgatgaaaatgcggatgtaaatttgagtgaaattacttctgatttaactgatactcagttacagatattggatttagttagaaacttatttagtgcaatttctctactgaatattgtcgatgaaggttcaactttatcggaatctatgataagaaaatataacgatcatgcccaagatttgaaattgctaaaaacagtaatcaagaaccattcagacaggaaaaaagctcacaatttacagttggcttacgacaaatatgtcaataaccgtcattttgttgatgttgaaactaaaaaagcctttcccaacaagcacctttatcgaaaaagcgatttttatgaaatagttaaaaagaatttggatgcatcaaaagaggcagttcaaattagaaaagaaatagcgttagataagtttatgcctaagcaacgaagcgatgaaaacggcgtaattcccttccagcttaatcaaatcgagctagataagataattgaaaatcagggaaaatattatccatttttaaaagagattaatccaattaaagctcatcgtatgcaggcaccttataagcttgatgaactgattcgttttagggtgccatactatgttggtccaatgattgaaccaacaaattcatcttatcctcaaactcgacaaaatcaatcttttgcttggatggttagaaaagctaaaggtcgaattacgccttggaattttgatgaaaaagttgatagacaaaagtctgcaaataactttattaaacgacttacaacaaaagatacttatttgtttggtgaagatgttcttccagcaaatagtcttttatatcaaaaatatactgttttggatgaattaaataaaattagtgtgaatgggaagaaattatctgttagcgtaaagcaagaactttatgaggacttattcaaaaagaataatactgtctcagctaagcagcttaaaaattggttaatagaaaatcagaaattgccttatatcaaaattaaggggttagctgatcaaactaaatttaattctagtttatctacatacattaaattaaaaaagtcaggtttatttgttgataaacttgactcaaatgaatttcgtgatgattttgaaaaaattattgaatggtcaactatttttgaagataagcagatttatatacaaaagcttcaaacaattgattggcttacagcaaaacaaattcaattcctacaaaatattagacttcagggttggggcagattatctaaaaaattgttaactgctattgtagattcaaatggtcaaaatattattgagcagttgtggaatagccaacaaattttcatgagtatagtaaataaagcagatataaaaggcacaattacagatgcaaatcaagatctcatgcattcaaatagtatggaagatattttatcagaagcgtatacttctcctgcaaataagaaaatgattaggcaggttgtaaaagttgttcatgacattcaaaaagctgcttctggtcaagcacctaaacaaatagctattgaatttgcacgtgaaagtagaagaaattctaagttatcacaaacacgagggcataagctacaggatatttaccaaaaaatatcaggagatatagtaaataaaaatttgaaggataagctggctgaatatatcaagaataatcaattaagtgtctgggaaaaaaatagcttccagatgaataaaaacgatcaagatttccttttttaagaatcttgatcgtttttttgttctctttaaaatttttaacaataaaaatcggcccttcagccaccttctttgacaatatttgttcaaattcatcatcataaaggcaattccgatatcggtttcgaccttctctttacctcgcaggtgcgttctgcgcatgccaaatacgttcttcaaatgtccgaaaactggctctacatcatattttctcatgccatagatgtgtctgccttcttcgctttggagaacttcttttgctttttcttttaaatattgccagttaggattatagcgaacttggcgctggcggccgctagctgttttagccaattgttccaattctggcgttagctggaactcgtctgcctcataaaccttaaaatcacggacctgaccagtagaacgatccttgcgctggctgtaatatttgaaattgaatctgacgccatgatgatcaatgtaataatcatctttttcattgtagtaccagttgattagcttagttggatcattcttatactttttggtctgttctttttcatacatagtgtagggaataaagtacttcttgtctggatatttttcctccagcatcgaataattgtattcactgccatagccagcatcggcgacgattttgtcaaacttgtccaacacggtcatttgatccaaaaccggctccaaagttttgaaatctgtcggattaggaaagatggcataatcaactacatattgatcggtcgtgactgcttgaatattgtagccaggctttaattgaccatttttcatgtggtcttccttcatatgcataaaggtggcgtcatgatctgttttggaataactgttgcgtccggcaaagatctcttcggcttcttcatatttttgcattcttggcacataatcttttcttagccggtgcagaatcttttttagtccacgtcgcttggcttttcgaggtgaaccgccaggaatggctttgttttcctgctcaatctctttagtcagcttgttaatttctgcttcagtttcttgagctaattcctttagcccctgactagtttgaactttttctttttccatttctttgactacttctttagtaatcaattcatcataaagttcaactgcctggcctttcagcttttcatgatacttttcaaccgctttgcgccagacaaatgtatagcggttagcatcagcttcaatcttagtaccatcgataaaagcagcaccttcattgattaagccttcatcttctaacaggttagtgaagtagataaagctctttttaatcagttcattggcatggctgcttgatctaaaattattgatagtatgatatgaaatcttttgctggtcagccaagatcatcattggcagattttcttccagcatcaactcaatctttctgccagaaaaaactcttctggagtaagcaaaaagcagtattttgagcatcatggctggatgataggctgggcggcccgttttagcagtcttgcctactaaaacatcttctggaattgaatctacaaaccagctgatgacattagccaaatgattggccggaatggcaaaatctagattaagtgttaaagcagtttgacctgtgatataattcttgtacatgttagtttccaccttttttattttgtgatgatttaataatatcaaggctggagctaaaagtatacaaaaagagcgttgaaacaaaaattcaacgttcttttttcatgatctgagacttagttttttcccagacacttcatgcaacttggaagagatgcttatactggtaagccaattaatattgatgaagtatctcagtattatgacatagaccatatcttgcctcaaagttttattaaagatgattccctgaataatcgtgtgttggttgctaaaccaataaacaatggtaagtcagatggagttcctttaaaactctttggtgataatctagctactggtttagggataacggttaagcagatgtggaataactgggctgataaaggactgattaataaagcaaaacaaaataatttattcctagatccagagaatattaataaacatcaagcttcaggttttattcgtaaacaattagttgagacaagtcaaatcataaaattagcaactacaattcttcaagctgagtatccaaagactaaaataatagttgtcaaggctagttctaatcactatttacgtaatgagtttgatttgtataaaagtcgagaggttaatgattatcaccatgcaattgatgcatatttaactactatttgtgggaatctactgtatcaagcgtatcctaaattacggccattctttgtttatggtcaatttaaaaagtttagttctgatcctaaaaaaagaaaatgaaattttaaaaaagaccaaaaattttgactttgttgccaaacttttgggtagtaaagcaccaaatgagatcagatctcaacaggggaaagttttatttgaaaagaataaaattcgattgcaacttaataaggcatataattacaaatatatgcttgtatctagagatacgacaacaaagaatcaagagatgtttggaatgactatatatcctcgggctgaacgggatatagcgaagagtcgtaaattaattgaaaaacgtaaaggattttcaacagatatttatggtggctatactggtactgcagcagcctatatggcaattgtaagaattaataagactaaatcttcacagtacaaagtaattgctgtacctatgacgaagcgtgctattttaaataaagctgaaaaagaaggtaactatgaaaagattctaaagcaaattttatcaccaagtattttatacaacgataagggaaaacgaaaagcaggagtaatatcatttgatattattaaaggtaaagttccatataaccaggttgtgcaagatggcaataaaaaatttttgttaaagagtgctatttatttatgtaatgcaaaacagttggttttatcagaagaggcaatgagagtaattactggtcattggctagattctgataagcaagatcaagaacttttggatgtttacgatgaaattttagaaaagattgatagatatttacctttgtttgacattagagattttagaaataaattacataagggtagagaaaaattcttgaaattaaacgctgaggataagtttaaagctattattcaaattttgaagggtttgcatgataattctgatacaggtgaacttaaagatattggtataactgtaccatttggtcaacttcaaaataattctggaattacattatcttcggacactattttagtttatcaatcacctactggtttgtttgaaaaacgcgttaagatttctagtttataaaaataaatgaggaaccgacatgtggttcctcatttttacataaaaaaagtccctcgatagctcgggacaagtgttgaaactctgcgtactaaaacgcattgcttgattttaaattatgattgttagatcaataaggttaagagttgggagctacccaacaaataaataatatcattatagatatagatgtacaaggagaaaaaatgggatggcgtaacgtaataataactcagcatgcaaagctaacatactctatgaatatgcttatagtccaaacaaaagatggtattaatcaaatacctattgaagatatcaatttggttttaatttcaacatcacaggctgtgattactagtgctttgataagtaagttagccaaaaatcaatgcaaggtaatctttgttgatgataaatatcaacctgttacagagacagtgaattattatcctggggctagggacataaagaagttgaaaatgcaatttgaatggaatgaaagaagaaaagaaaatttatggaccaaaattgtagctgctaagctaaaaaatcaaatatcggtgttaaaaaattatcgaattgatgaaactgaagttgagcaagagctgtacaagttagaggtgaacgatttatccaatagagaagcagcggctgctagaaaatatttcatgaagttatttggtaaggactttattagaagaaattccggagtgattaatgcagcactagattatggatactcaatattgctttcatccttcgatagagaaattgcaatgaatggatatttgacttatctgggaatacatcatcattcagtggaaaatcaatttaatttagcttgtgatttaatggaaccatttagatccatagttgattattgggttaaggcacacgaaaatattaccagttttacaccagatattaagtatggattagttgagttgcttagcttacaaataaaattcaatggtaggaatacaattttaacgaatgcaatttctgtatatgtaagaagctgccttagatatttaagtggagaaacagatgatattagaatagagatgagtttgtgtaatgaggtaccgaatgatgcgattaatgataatgtttgatttgcctacggacactgccgctgaaagaaaagaatatcgacaatttagaaaagctctaataaatgaaggatttttaatgattcagttttcggtgtatgaaagagtatgtgtcactagacaaacagctaattttttagaaaagagaataagaaaatttatgcctagcaaaggtgttgtgcaaagtctaatggttacggaaaaacagtacagtgatatgcatttcttggttggggatgcagtaaaagatattcgcaatacttcagacaggacagtgatactatgattgtttcctatttgtcacataagaaaatctgtttaaaagatggaattaatgttatttgcactcaaagtcccattgcctataaagatctggttttaggttttcaagccttaaatgatctaatagtatgttctgatgacgaatacaacaataagtctattagtaagagttttgattttgtaggagccccgttgttaaatgacaatattatggcaaagtatatgaatgtcattattaagaactttatttctaacttggatgaggtaaacagaaatagaattttaaaatctttttattcattagaaacagtattgaatgattctttgcttttggaagatttacctttagaaattgattttagcgaagatattaaaaagctgttgaaaatggttaacattcatttagatgctcaattaatgttaacgagactgtaaaatagtttgtgtaaggatgaataattccttaaatttatttctttaaacattagaaaaaggagttcctttctcgtatgattggtttgaacaaaaaaacacatacagaaagaagaactccttcatgaatgattttaccaaaaatatagcacaagctctattcaatccagacaaaataaacgatttattgcgcaaagagctacaacaggctgttaataacttgctagaagctgaattgactgcctttctgggctatgatccctatgccagaaatggctggaatactggcaattctagaaatggtgcttatttccgcaaggttgatacccagtttggaccaattgaagtgcaagtgcctcgagatcgcaacggccagtttcatcagcacacgctgcctgactacaagcagcactctgatgttttggaaagcacgattatcaagctctactccaaaggcgtaactaccagagaaatcgctgacttgattgagaaaatgtatggcagtcattatagtccagcccaagtatcaaatatttccaagcagatgctccccaaggttgaggcttatcacaagcgcaagctaagcgacaagtttttctgtgtctatttggatgcgacataccttcctttgcgccgagaaacgtttgagcgtgaagcagtctatattgccattggcattaaacctaatggacataaagaagtcattgactactgcattgcgcctagtgagaacattgaagtctggacagagatgcttcaaaacatgaagtccagaggcttgaagcaagttgagctctttctttctgatggtgttgttggcatgaaagcggccttgaccaggacttatcctaaagctcattttcaacgctgcttggttcatgtcatgcgcaatatctgtgctaaagtccgggtggatgaccgcgaaaagatcatgaacgaattcaaacaggtgcatcaacagacaaacaaagaagaagccacagctgtcctgcatgacttctataccaaatggggcaaggtttacagccatgttatcagaagcttgaaagacatagaaccagatctgctggtcttttataactatcccaagcagatcagagcttcaatttattcgactaacatgattgaatcatttaacaatgtgatcaagcgcaaagctaagcctaaggcagagtttccaactgaacagtcgcttgatgcttttattggcattcaggcaatgagctacaatgaccgttatttcaatcgaattcataaatgctttggtcaggttcaggacaccttagaatcctactttgattaaataaataattaaaaaatcaatttacgagaaagatctatttacacaaaagatttgacagtttcatgttaacaccatatgctataattgaaacagttcttaagattcatcaagaatataatcttgatagtattcccgtgttttgtaatgtagctcattaccttgatgaaacacagttaaaagaacttagtaagattgttagacaacttaaattgaaaattattttaattgaattcacagataagaaatatggggtagcagtcaaggatgctcaagttgcatatattgatcgagatcttgttgattggtattagacaattgattaaaaagatattatgaaatatcggttttagatgattgttagatcaatgaggtttagatcagtagtctccaattcaaaaggtgcttacgtgttttagatgattgttagatcaatgaggtttagatcaagcacttgaatcttgtccctgctaggaacgttttagatgattgttagatcaatgaggtttagatctcgaatttagaaaaatcaacattaacgcgggttttagatgattgttagatcaatgaggtttagatcccgtgaaaacggcgtttacatgcgtaagacgttttagatggttgttagatcaatgaggtttggatctattagcttttgcggcggtaccaacgtacggttttagatcaatgaggtttagatctaaagaaataaataatagaggtgtgaggtagttttagatgattgttagatcaatgaggtttagatcccactatcgcgcctggaatacctgttttctgttttagatgattgttagatcatgggagtcagaacagtaatatgcataaatttacaaatatttttctgtaaataaaaatcgctctagagaaactctagaacgatttttggacatacttgatcttagtatctattattacttagcgtaatcatcaatacccaagtgctccaaaataagtgcggcagtttcttcaatggagcggtgagcaacattaattacatagcaacctaatttcttataaagtgcttgtgctgattcaagctccttgttgattgaatccatattagaataagtagtatcaggattcaaaccataagcgatcattctttgacgtctgatttcgttcaatacagatggatcgttagtcaagccaataatcttcttaggatcaatttcgtagatttcttttggaatgtgagtttcaggaacaagtggtaaattagctacctttaagttcttattggctaagaacaaagaaagtggagtcttagaagttcttgataccccaagtaaaacaacgtcagcttccaagaaaccttttggatctttaccatcatcatacattacagcgaattccattgcggaaattctgtcaaagtacttttgatttaagctatgctgtgcaccaattttttgatctggtgtcatatgagtagtttgttgaattgcttcaactacaggtgagaagatgtcaacacattcaacattatgctcacgggcaaatttgataactggcatttgcatttcatctttaaccaaactgtagataattaccaagtttggatatttttcaatttctgttaaaacttcgtccaacttcttttggttagtgataaaggggtaacgacgatagttgatattgcagttaggaaattctgcagctgcagctgtggcgttactaaaagcagtgtcaccagccgcatcagaaataataataatgtttaattcattttggtcttttgtttctaccatattaagctcctcgtgtattattaaatatctttctgaaaataattatactattaatgaaagcggattaacaataaaaactcagctcttttattaaggtaaagtagtcggtttacttaacttaaaaatttatcaaaaagtttttgaattgtattgaccctaaagattagtttggtataatttaagtaaatgtatggcgtaacgccaagaaatggaaggagggatcacacatggctaagacaatcgttcacgaaaacgagtctattgatgatgctcttcgtcgtttcaagcgttccgtttcaagaagtggtaccttacaagaataccgcaagcgcgaattctacgaaaaacctagtgttcgtagaaagttgaagtctgaagctgcacgtaagcgtagacattattaataaactactgagaaagctacctgtttttgggtagcttttctttttgacttcttgaagcataattttgattatgttaagtaaatatttgttagttttattttagttaagaacatagtttgttataatactattgggtttttaatagaaagaaggatattaaatgagtttgtcagatcaaatcatggctgatatgaaatcagctatgaagaatcacgacaagacaactcttaatactgtccggatgatcaaatcggccttaatgaatgaaaaaattaaagcaggacacgatttaactccagatgaagaattaactgttcttaatcgtgaaaagaagcaaagagaagaatcgattgacgaatttattaaggctaatcgtgatgatttagctgaagaaaccaaaaaagaattagcagttgtagaaaagtacatgcctaagcaaatgaatcaggatgaacttagagcagctgttaaggaaacaattgatgaagttggtgctaaaggtaagtccgactttggtaaggtaatgaaagctttaatgccaaagattaagggacgtgccgatggcaaggctgcttcgcaatcagttcgtgatcagctaaattagtagtaacaagaaggagcgggtctatttggctcaaacaacttttacacctcaaagaccagaaaatattcaaaaactagttggagttaatgacggaaatttaaagcttctttctgaaggttatgatctttctgtgtcagatgtcggtaatgagattgtcattgcaggagacgatgaagagaagatcaagaaggtagttgctgttctaaaggcactcgatagtgttgtgaatactggtgttaacatcggtgcgcccgacacagtaagtgcgatgaagatggctgacaagggtaccacagagtactttgcagacctatataaaaaggttttgattagggatgctaaaggtagacctatcagagtcaagaatatgggacaaaagcgttatgtcgaagctattgataaatctgatgttgtctttggaataggaccagctggaacggggaaaacattcttagccgtagtttgtgcaattgccgcctttaagaagggagaagtttctcgaatcattttgactaggccagctgttgaagctggtgaatcacttggatttttacctggtgacttgaaagaaaaagttgatccatatttgagaccaatttatgactccttgtatgctattcttgggactaatacgactgaccgtttgatggaacgaggcgtaattgaagttgctccacttgcttatatgcgtggacgaactttagatgacgcttttgtaattcttgatgaagcccagaacactacagatgcccagatgaagatgtttttaactagacttggatttaattctaagatggtcgtaaacggtgatatgacacaggtcgatttacctggtcgacagcatagcgggttaattgatgctagacatatcttgaagaatatcgaccaaattaaatttatcaacttttctgctaatgatgttgttcgtcaccctgtagttgcgaaaattattactgcttatgaaaaagaggacattaaacactaaaaatggatccaattgatattacttataatgatgaagttggctttttagatgatgaaaagcgtaactggcaagactggattatgaaacttttgctgctagctaagaaggaaattggcaaagataacaacttagagatgagtattaactttgttgacgaagatcgtagtcatgaaattaatttaaagtatcgtgacaaagaccgtcctactgatgtaatttcctttgcaattgaagatggtgaggattcaattgatcttgcagcatttgcagatgatccagactttcaagaggatatcggtgatctatttatgtgtcctagtgtgattaagcgtcacagtaaagagtatggtacaggttttgatcgagaatttggatatacaatagtccatggctttttacatttaaacggctacgaccacattaagccggatgaggccaaagaaatgtttggtattcaaggaaaagtgttagaagattatggtttgccattgtatcctgatcaattagatgaaggcagaggtaaataatggaagaaaaagagtttaagtctggctttgttgctttagttggtcgtcccaatgttggaaaatcaactttaatgaactatttagttggtcaaaaagttgccattacgtctaataaaccacaaacgactcgtaatcgcatttcgggtatttatacttcagatgaaatgcaagttgtttttgtagatacgccaggtatttttaagcctcattcaaaacttgacgactatatggataaggctagtgtatctagtttgaatgacgttgatttagttttattcatggttgaacctgaggaaatgggtaagggcgatcaatacattgccaacttgttaaaagaagtaaaagttcctgttcttttagtaattaataaagttgatgaaattcatcctaataagcttttgccaattatggattcatatcacaaacttgagggctttaaagaaatactaccgatttctgctactcaaggaattgggattgaagatctgcttaaaacgattaaggaatatttgccagtaggcccacaatattatggtgctgatcagatcacagatcggcctgaatattttgtggtagccgagttaattcgtgaacaaattctgcgactgacttcacaagaagtaccacatgctactgctgtcgcagttgatcatatgaatactcatcaaaatggcaagctcttgattgaagcgactatctatgttgagaaagacggtcaaaaaggcattattattggtaagggcggtaagatgctcaagcagattgggattaattcacgtcaagagattgaaagattgcttggtgaaaaggtcaacttgcgtctctgggttaaggtccaacataactggcgttctgaccctaactttttaaagcgaataggctatgacaaaaaagaactttagttgaattactgttgtataagcgttgtcgaaagatgacgtcttttttgtatgtttagggagacaagaaaattctattcgttggataactaatgggataaaaatagatacaatagtaatgacaaagtgatgaaattttgggatctattgttttgtgattgttgttatattgggatttgtttactgtattctccacgtatgtggaggctgaaacccagtttcgaagttgattctgggtaaagtcttggtattctccacgtatgtggaggctgaaacagcagtctttttgtactatagactatttatgatattatgatatcttcatcagaatatctataaaaaatgaattttaaatactaaaggagtcatgatatggcacgtgaactaaaagaagttcagggtattatctttaaaaggcagaaatataaagaagcagatttattagccaaaattatgactaaacaagatgggattatgactctgattgttaaaggagccctgaggcctaaatcaagattaagtgcagcaacattaaatttttctattggtacttacgtaatttatacgagcgaaaagggcttaagtaatttacgcacatataaaggggcaaggcagtttgatggcttatataatgatttaaccaagaacgcttatatttcttttatttttgatttaattgatcacgcctttgtagaatatcagccaattggtaaatattatgatttagctttatttgctttgaaaaaaatagatagtggcgttgatgcagaaatgattacacaaattgtgcagatgaaaatattagcagcatatggtgttgagccacagctaaagcattgtgttatttgtggtaaggaaaaaggcgtttttgattattcgattaaaatgggtggagttatttgtagcgatcattttagtacagttactagccgaatgcatttaaagccaaaagaaactgctgtaattagaacaattggcttattaccgattgagcgattaggcgatattaaaattaatgaagaaacgaagagggctactagaaaagcgattgatcgtatttaccatgaaacgataggcctaaatttaaagactaagaaatttttagatgaattaaaactttttagttagtaaaaatctggttttaccatgacccatgtgttaaaataaaaacgtatttgacgatgatgaggatttaagaaaagtactagttcagcgaatgtcggtcggtgtgaggacatctaggaaaaggcacctctagtcatattgttcaattaagagcaggaaggatacttcctgaattagggtggaaccgcgataatatttcgtccctatgcaaaattttgcataggctttttttatggcctagcgcaggaggagattaaaggaaatggcagataagaaattaaatattcagaatatgatctttaagctggaacaattctggtcctccaaaggttgtatgattatgccttcatacgatgttgaaaagggtgcgggtacaatgagtccttacacttttcttcgtgcagttggtccagaaccatgggcagcttgttatgtagagccttctagaagacctgcagatggtcgttatggtgaaaaccctaatcggttattccaacaccaccaattccaagttgttattaagccagctcctaaggatattcaacaatattacctagacagtttgaaagttttaggtatcgatcctttggaacacgatattcgtttcgttgaagataactgggctaacccatctatgggttgtgctggtgttggttgggaagtatggcttgacggtatggaagttagccaattcacatacttccaagttgttggtgaattagatgttaagccaactatgagtgaaatcacttacggtgttgaacgccttgcgtcatatattcaggatgttaactcagtatttgatcttgaatggggtaatggcattctttatcgtgatatcttcaagcaaccagaatatgaacattctaaatatgcatttgaagaatcaaatcaagaacaattgcttcaattctttgatatttatgaagcaactgctaagcgtttattggataagaacttggttcacccagcatatgattacattttgaagtgttcacatacttttaacttgcttgatgctcgtggtgctgtttcagttactgaacgtgctggttatttatcaagaattagaaatcttgcgcatgaagttgctgtcaaatttgtcgaagaacgtgaaaaacgtggcttcccattgcttaaaagtgcagaagacaaaaaggcgggggtagaaaatggctaaagattatttatttgaaattggtactgaagaaatgccagctcacgttgtaccacgcagcgttaagcaattagctgacagaacaagaaaatttttaaaagaaaatggcttgaaatttaaagatattaagactttttcaactccacgtcgtttgactattttggttgaagatttggctgaaaagcaagacgatattgatgaagttaaaaaaggtccagctaagaagattgctcaagatcaagatggtaattggactaaggctgctcaaggatttgctcgtggccaaggaatgactacagacgatatctattttgaagaacttaagggtactgaatacgcttatgttcacgttcaaaaggaaggtaagaaagctagtgatatcttacttggtatgagcgatatcattaaggcgatgactttccctactaagatgcgttgggattcaaatgattttgagtttgttcgtccaattcactggcttgtttcattatttggcagtgatgtaattcccgttaagattttggatattactgcaggtcgtaaaactcaaggccatcgtttcttaggcgattcagttgttttggccaatgctgatgactatgaagatgcattaaaagatcaatttgtaattgctgatgcagatgaacgtaaagatatgatcgttcgtcaaatgaatgaattagttaagaagaacaactggcaagttaaaccagatcgtgatttactagaagaagttacttatttagtagaatatccgactgtatttgctggttcatttgatgaaaagtatttgaagattcctgatgaagtgctgattacttcaatgaaagacaatcaaagatactttgaagtctatgatgaaactggtaagttaattaatcactttattgctgttcgtaacggaaataaagattaccttgataatgttatttcaggtaatgaaaaagttttagttgctcgtttggacgatgctcaattcttctatgatgaagaccgcaagtatccacttagtcattttgttgatcgtcttaagaatgtttcattccacgataagattggttcaatggctgaaaagatgcaacgtgttcgcatgattggtgattacttagctaagcgttgggatttaccagagaatgtagtcaaggatttcgaccgtgctagtgaactttacaagtttgacttagttacccaaatggttggtgagtttgcagaacttcaaggtgtaatgggcatgcattatgctcgtcttgcaggtgaggacgaagaagtttcagttgcaatcaaggaacactacatgcctgccactgctgaaggtccacttcctgaaactacggttggttcattattatcaattgctgataaaattgatacaattgtaaccttctttggtgcaggaatgattcctacatcatctaatgacccatacgcacttcgtcgttatgcatatggtattgtaagaatcttacttaatgagaagtggtcattaccatttaacgaagttttaccagaaatcattagtatgcttaatggtgtaactccagctaagctacctaagagtgatgctgaccaggaaattgcagacttcattcgtgatcgtgtcaagcaatacttacaaaagaatgacttcaagtatgatattattgatgctgttcttgcttcaagtcaacaagatccaagtcaaattttagcagcagctactgtattgcaacttcaccatgatgatgaagaattcaagccagtagttgagagtttgactagaattgataacatcttaaagaaggctaaatttaagagtaatactgctgttgatgaaagtctctttgatgataacagtgaaaaagaactttacgctggcgttcaaaacttgcaagatattgaaagtttggctgatctctaccaaggttttgttcaactgcaaccagtgattgatcaatactttgaaactaatatgatcatggctaaggacgaaaaggtcaagaataaccgattagcacaattatatgcagttaatgaattagcagatcgtttaggtgacttaagcaagttagttattaagtagttaatttagatagaaaaagggtgattcatatggctggacggattcctgaagattttatttcagaggttcgcagtaacgtcaatattgttgatgttatcagtcagtacgtttcgcttgagaaaaaaggcaaagactatattggtctttgcccttttcatcaagaaaaaactccgtcgtttactgtaaatgctgataagcagttttttaagtgctttggttgtggtaagggtggaaatgtttttaaattcttgatgtataaggatgatttaacttttcccgaaagcgtcgagcgagtagctgagtttgcccatattgctatgcctaatggatatggtcataatagtggcaccaaattaaatccacttatgcaaatgcatcaggatgccgttgatttttatcatcgtgtgcttttgactactaaagccggtgaacgggggatgcagtatgctcaaaagcgagaactagatcaagaaatattagaccattttaagataggctatgcacctaaggctgataatgttttgattacttatttacgtagtaaaggttatcaagatgatgatctagcacaaagtggtttatttgttcaagctagggatgggcagttatacgaccgttttcgtgaccgtttgatgtttccattggataatgaaaatgggagaacgataggcttttctggtagacgaatttctgatgataagaccgaagctaagtatatgaatagtcctgaaacggggatttttaccaagtcaaaggtattattccactttgcagaagcaaagaaagcagctcgtggtgaaggtcacttagttctatatgaaggttatatggatgtaattgcagcatataaagcaggggtgaaatcgggaattgcctcaatgggaactagtttaactgatgaccaaatatatttgttgagacgtattactcctaatatcattattaattatgatggagatgatccaggagtccatgccgaagaacgtgctgcacgtatgtttaataaagatggcaattttaatttaggaattgtagttttaccagaaaaactagatcctgatgaatacgtcaaaaaatatggcgctgagaagtatctggaagaagtcaaaggtgccttaacgccgactgactttttcttaaaacggttggaacaaaaatataacttagataatgaccgtgaaaagattgcttatttaggtgaggccgtaaaagaaattgcacaagtgcgcaatccagttgagcaagatatgtatactgaaaaattggcgaagtctagtggggtttctattgcttcgttaaaggcaaatcttgctaaagaaagacggcgaaataatcgggcacgcaatcatgtacgtaattctcaaagaaattcacctgattatccgatagacgtacctttacctggtgatgaagacgtgcctacagagcagtcagtagttgaaaaaaatcctagtcagaccagactcttgtatttatttattcattcaactgatgctcaaaaatatatgttagaagggcaatttcattttcctaatcaggattttgaaactctggcacaggattggttaaaatatgcggaaactcatgaaaatccacaaattgatgggttcttagattttattcctgagcaacttcaaggtataatagtagatgctgaaatggcacagatgccaaaagattctacaattcaagaagttgatgctttggttctagcattaaaaagacgcaacatctattccaggctgaatgagcttcaagctcaattacaggatgctaagcgcaaaaatgatgcacaaggaattattgcaatcactcaggagattattggattaaaacggatcttaggttaataaggaggctttttagtggcagaaaaagaaactacacaaaaactatctttggataagatggttaagcaagtcgtaaaagacgtaaagaaagataagtcgatcactgaagaagatttcactgctcgtttgattaagccttataacttacaaggcaaggctgtagatcaactagtacaagagtttgaagataatggtattagcattgttgatgaaaacggtgatccttcaaagttagccttaaagaaacaaaaggatgttgaaaaggctgaattaaaggatatgtctgctccatcaagcgtacgcatgaacgatccagtgcggatgtatttgaaggaaattggtcgtgtaccacttcttactgctgatcaagaaattgctcttgccaaaagaattgaatccggggatgaagaggcaaagcaagaattagccgaagccaaccttcgtttggtagtttctattgctaagcgttatgtaggacgtggtatgtcattccttgatttgattcaagaaggtaatatgggactaatgaaagctgttgataagtttgattatcgtctaggctttaagttctcaacctacgcaacttggtggattagacaggcaattactcgtgcgatcgctgaccaagcacgtacaattagaattcctgttcacatggtcgaaacaattaataaattgatcaggatacaacgtcaattgttacaggacttaggccgtgaacctacaccagaagaaattggtgcagaaatgaatatgccaaccaataaagtacgtgatattctaaaaattgctcaagaacctgtttcattagaaacacctattggcgaagaggatgattcacacttaggcgactttattgaggataaggatgcaactagtccagaacaacacgcttcttacgaaatgttgaaggaacaacttgaacaagtacttgagactttaactgatcgtgaggaaaatgttttgcgtttgcgttttggtcttgatgatggtcgtacccgtactttggaagaagtaggcaaggtatttggtgttaccagagaacgtattcgtcagattgaagctaaggcattacgtaagttgcgtcatccaagtcgctcaaatcaattacgtgatttcatggattaattataattatctatattaaaagagctaagttttacttagctcttttttattggactggatctttacctgctgcccttagattatcttcaatgattttcattggatttaaccaagtgccattatctttccaatagtatttgcatggcgtattgtcatgctttttatcaatgtaatctttatctgtcttagtaactcctaaatgaatgtgagagccggtcagtttaccaattttttgtcccaacttgactttttgaccttttttaacataaatatcagtaatactgaggaagccttcctggtaaacttcaacatagccatcatcggaaataatccaaatataaagtcctaaacctggggcgtatttaacacgatggacagttcctgcatgcacagcatatacggaagaatgtccaacttcactaaatccgaagtcatagccatcatgaaaataactcttgctaggatagactcgacgaatgacgtcagtttcaccaaacttttgtccagatttaaatttgattttcttttcatagagcttcttaaaagggtaaccccaagtaagatgaacgacttttttctttttagcagtcttctttttcttaaccgtgtgagtttgtggtcgtaaactattcagattgttttgccataagggaatagaggcaaaagctaaaatagcaattaaagcagctaaaagtgcaaacttactttcagtttttttcattaaaatagctcatctcgctttccgtcaagcatatgttcactaattgtttgttcaaaaaatactggtaaatcatgatcaaaattgtaagctaacttttgctttttcaattctttagcactcatccaggttagtttaccttcgtctgattctttaacggtacccgaaaattgttcagctatgtagaaaaatactaaataacgttcatcattgtgatcataaaattgtttaacaccaactaattgaggatgactaatcgttaatccagtttcttctttgacttccctgacgacagaatcatgaaaagattcatgcgcttcaacatgaccaccaggaaaagtaagtcctggccagaccggatcgttgcgatcaagaactaaaacctgatctttgtttttaaccatgcacatattagttaatgtgacattttctgttctactcatgtaaaaaacccgctttctgtgacgattatatcaaatagtagcaaaataagactatgaaatatgctaaaatttggttaaccatatcttttatggaggaaacatgaatttaagattaaatacgttggcaaagatggtagatcctggcagtcgagtggctgatattggaactgatcatgcatacttgccaattgaattagtaaaaaatggcaaaattgattatgcaattgctagtgacgttgcagagggccctcttgaaaatgctaaaaatgatattgcagcagctgggttaaccgagcaaattgaaactcgcttaggtagtgggttagaaaccgttactcatgctgatcagattgatacagttgtgattgccggaatgggcggcaagttaatgactgatattcttgatagagcttggagcaaagatgcacaatttaaaactctggtactagaacctaatataggcgaagcaggggtacgtaattggctgatgatgcataattataagattatctcagaaaaattaattgcagaggctgggcatacttatgaattaattaaggctagcttaactgaagaaaagcatgagatgactgaaaaggaaatcttttttggcccctttattgtacaagaaaagaatctagttttttatcagaaatgggaaggccaactcgcttattatcaaagattcctggttaatttgaataaagcaagaaaaaaagacgaagatcgaatcaatgaagtagatcatgatattaaattaatcaaggaggaattggagaaatgaccaaagtaaaagacattgttgcgcgtttgcgacaagattttccggaaaacattgcttcacaaggtgatcctgttggtatgcaaattggatcaatggaggctgatgttaccaaagtaatgactactttagatgtacgtccccaggtagttgaagaagctgttgaaaaaggggttgatttcatcgttagtcaccatcctgtaatgtttagaccagcacaaaatttggattttgcgaatgcacaaaacgcaatgtatggcaatattatcaagaatggaattactgtttattcaattcatactaattcagataaagcccaagatggatctgctgattggcaagcagaggaactaggtctgcaagatgttgaaccattttgtctggatgatgatggaattgctatgggtagaaaaggaaagttacctagaacaatgactgcttatgattttgcctattatgttaaagaaaaaatgcaaattaaaatggcacgtctgattactgcaaacaatgaaaagccaattaccagtgtaggatttatttgtggggatggtggtaaatattggactagagccttagatgaccatttagatgcttttattactggggatgtttattatcatgtaggccatgatatgatttcatctggtttaactgttgttgatcctggtcattatactgaaaaactatttaagtacaaggtctatggtcgacttaaaaagtggaatgaagaaaataactggaatgttggaattgagctttccgaggtttctactaatccatttcaagacttattttaattagaaagagagttatatatggaatatcctaatttgttacctagatttttaaagtacgttaaagttaattcgcgttctgacgaacattcagatcgctttccatcaactgaaagagaagaaaacttccaaaagaatgttattatgaaagatttggaagaattaggtttaagtgacattcactacaatcaaaatgctggtagtgtaatcgctgaaattccgtcaaatgttgattatgatgttccagtaatgggctttttagctcatagtgatacggcagactttaattcagaaaatgttaaaccacagattcatgaaaattatgatggcgaaagcaaaattcaattaggagattcagagttttatcttgatcctaaagtttttccacatttgaagaattataaaggacaaacaattattacggcctcaggtgataccttacttggtggggatgacaagtgtggtgtgtcagaattaatgacttttgcggaatatttaatgaatcatccagaaattaagcatggtaagattcgattggcctttactcccgatgaagaaattggtactggtgctgaacactttgatgttgaagactttggtgctgactttgcttttactgttgatggtgaagctcctggtaagttagattggggtacattctctgcggcacaatttagtcttgatattcagggagttaatgttcacccagctgttgctaaggggcaaatgattaatgcaattcaagttggaattgactttcataatcaactgccagaacacgatcgcccagaacataccgatggacgcgaaggtttcttccatctaatgaattttgctggtactgttgataatgctcacttagattacattattcgtgattttgaacgtgatgggcttgaagagcggaagaatttggttaagtcaatcgttaagaaaatgaatgatgaattcggtactgaacgaattacacttaaaatgtgggaccaatattacaacatggccgatgaattaaagaaacatatggacatcgttgacttagcgcgcgatgcttataaagcagaaggtcttgaagtcaatgaagacccggttcgtggtggtacagatggctcacaattgacttatatgggcttaccatgtcctaatatttttgccggagaagaaaacatgcatggtcgttatgaatacacagttcttgagtctatgtggaaagctgttgacgtgatgatcaaaatggctgaattaaatgctgaaagagctaagtaagtgaaacatttttgactaaaaatatcaataattctatttctgatctaatatgagattattgatagattaggaaatagggtaaacatagttaataaataaaaattatgcactaatactattaaaaataaaagatagtttataattaccgtcattataggattatagactatctttttgttgtacttttaacttttatgaacttgtgaaacaaagtgattaaacttagcccttgcaaaaagtgactaaagtaagtattatagttagtgtaatagattaataatacagtacaaaataggagctgagtaaatggaatttaaagataatattcctatttatcttcagattgaacaatacttgtatcgtcaaattgctttaggcaagttaacagctggtgagaagattccttctgttagaaaacttgctctagaattaaccgttaatgttaataccgtgcaaagagcactacaacagatgaacagtcaaggtattctttatactaaacgtggcgaaggtaattttgttactgaagatactaaactattatccgaaaccaagcagtcattaattaataatgaattagaacagtttgttcaaaatatggaagagtttggaataggaaagaacgagttagtttcaacgttagagaattatttaaaaaatggtggggatcagaatgaatgatttattagctattaaagatgtaagttataagaaaaatcagaagcaagtattgcaagatgtgaacttgaatttagctcctggcaagattgttgcgttacttggtgaaaatggtgctggtaagaccactttgatgcgaattattgccggtgtagctaagaattacaaaggcgaaattaatttagagggggcaacaaaagaggcagaaagaaaggctaagttgtcttttactgatggtttaactggcttcagcgattcaacaaagatcaaggaagtggttaaattttacgcaacgatttttcaagattttgatgagaatgaattcgatgagctgcgtaagtttatgaaattagatcctgaaatgaagttgagtcagttatcacgaggaatgcgtgaaaaattgattattgctttaacatttgctcgtaaagcagatttgtatttacttgatgaaccttttggtgggattgatgcaatggctcgaaagaaaattattaattccatcattttgtggaaagatgaaaaggcaacgattttaatctcagatcactttgtcaatgaaatttcatcattgcttgatgaagtggttattgtaaaagatcataccgttttggaacacaagtcagcagatgacattcgtcaaacgcataagtcaatcgaagaatactatgaaagtttttatgcagatgaggatgatgaataatgactagttttaacacattgtttaatcgaatgtttcaagaaaaaagcaagtcagtctatttaatcttcttaattcaagcctttgctagtttatgttttacaattattggttttgtttcggaaaatggtacaccagaatttgttaatggaaaagatactagttctgtcaatgtgattgttgcttttctcgctgtatttgcagtaatgatgctgataacgtcatttatcgctgattttgtttattggattatttcttcaatcaagaatgaaaaaattaatcgcagtcaaacttggcgcttgattccggtaactgatactaagtttttgcttagcaattttgggacagcatttttaacttatatttggttaggaattttagaagcggtcacgataatcgttacccttttgccgatgttgtctgatcaagatgtgcgcaaagcaataggtcaggctagcatccatctttcagcaagagactggcaaacaatgctcggaagtttgctgctaatcatttttattggctatgcttggtacgcaattgtaagtttgcttaacctagcaagccgcagcattattgattttttgccaggtggctcaagtaaagtatggacctttattattagagtaattgtaattattgcgattatttggattttaggccatgcggcaacaattatcttttcagtcttaggaaagtttagtccttttatggtcaacagccaggatattaactatgccactacgattcttcaattcttggtctttgatgttgtgattactttgatcgatatcttgcttttgaataaattcgtagaagcaaaacagaattaggagttttttatggcaaattttaagaccttgtttaagcaaatgtttgtgcaaaaaaggcgctacgctaacttagttttgttattacaagtttttgcagtcctttttttgctggtaatggctctgttagataaaagcaatttagcttatctcaacattagtaaggacagtaattggctagatcgtttgcttagtgcaggaatgctcgaaacgccgattgccgatgtgatttttgttggtctgctttgctggcaaaatgaaaaaatcaacctcagtcaaacttggcagctagctccagcttcaagtgtcaaaatctggctgattaatatgctttctagtttagttgaatgtatttatatttttgtaattcaagtcattttaggcttcgttgctgctatgattgataatttaagtcatcattattcactgcttcatgacttagttgatgctaaagttacttgggcagatgctagtttattaattgaatttctattgttcttaactggaacggttttagttattatgacttttgtcagttttgctaattttttgacgaaagtaattgttgatcaattgccagttaacaataatattgtcattaagttatttgtgatggcagtgattgtgattattgcaatcttgattgctgaacagctaaacgaacaaattactgctatgtatttgcatcgttttgccaaagaagcagcatatgatccattgggtatttcagtggttgagtactttgcaggagcaattgttttaggagcaatcgacagctacttaatgagtaaatttgtcgaacctaagataattaatcgttaattgaaggggaggggtagatagtgacgaatttttggaccttgtttaggcaaatgtggacgcaaaaaagaaaatttatttatttggttttcttaattaatatctttgctgtagtatttttatcaggttattttcttcttttcaaaaattggaatggtctagcaaatctgccgtctaaaaatttagggcaattctggcgcaataattttgtctatgtgactttatacattgattttgccttttgtgcgattacatgttggcaaaatgaaaaaattaatctgagtcaaacctggcatttagcagctagcgatgaacgaaaaacatacttagctaatatatttagcagtttgctggcatgtggttatttcttcttgctgcaagaaatcgttaatagtctgttgctgatccctagttgcggggcagacagttttgctcaagcatttcgtgagtttggtctgtatccaattaaaacagttcccggcgttgaaataactagcaatcgaatgcttgcttttcattggttgtttatcattttgataattttaatcatttacttctttgtcagctttgccaattttagttcgcgagtaattactgatttcttgccgtttaagagtacagtttgggctcgcttgttaattatcgcaattttggtaattgtcgcagcttactgcggcatgatctttatgtctaagttacagggctttgttgataagagtccaaatttacaagcaaccgatccaatctggttagatgatttatgcttgtttattgttagccttgttttcggtattttgaatctagtattcgtgaagaaatatcttgaaccaaaaatagattaattaatgcaaaaaaagagcttcatttcaatcaagaaatgaagctcttttttgtagttaactaagcatttgctgacatgtaatcataaagctgatttacttcttcggctgtgaattgtccatcgccaactttcatggcgtgaactttttcaactgagaggtgactagcaaaggctaggtcagtgtcattaacatggtgttttacttgaaaattgataattgcatcagataattcttcttgctcattcataataatttctccttaccctctaattttaatcaaattggaataaaaaataaaattttttgcaatttcattgattaaaatgttttccattgcgtaaatggccaatacctgaagacgactcggccaactaatgcgctgcgcttaacaaaaccgaagtaacgtgaatctttggaaacatcgcggtgatctcccatgacgaagtaactatccttaggtactcgcttttttaaagtgaaattgttagtatagagttcacctaatttatgtgactttctttggtagccattatttaaatatggttctgcaatttgtttgccgttaatgtaaagcttatcatttttagaagtaaccatatcaccaggtgtaccaataattcgcttgatatacagagcacctttttggtctggtgcttttagaatgacgatatcatttcgtttaggcgtaaaatgacgtacagcaatcaaacgatcgccattctcaaatgtgggctgcattgatggaccagatactgtttcatttgataggaaaaaactaaaaataaagtagtaaattcccatcaaaattgcaaacataataattatgtctaaaacaaagcggccaatgctttcatcatcatttctctttttggtttcaaccatagaatatctcctttgcttgctagtcttattataactgaattctccgccgttgaatggtaaaatcatattaaggtgtttaagtatgacaaaatttttgacgaaattaacaaaattagagcaagagataaatcatactgcggttaaacgacaagttgaagaaatagcattaattgatagttatgtacaagcaggtaagccattgaagcgggcaccacgcagattaggtttattgccagatgaatttgaagaagttttagttgaggtgggaccagataaagaaggggccttaagggatttaaataatttacttaataattttcggcaatatctctctttaatatatggcatctggtctctgcctaatattcagactgcgcagttaattaaaaataagctgcatgtacaaacagcgttagaaatcatggcaggcaacgcgtattggtctcaagctttgactcaggttggaattaaagttcacagtacagactcattagagtgggccaagacgtcgaccactggagctaagcctttttatccagtagaagatttaccagctgaccaagcaattaagaagtatcacacagttaatctagttctatgttcgtggtcaccaaatttcggtcacggagatttagaaactgtggcagcttggcataagtataatccaagttgtcatttgctctttgttggtgaaaaagatggtgctactaattcaccagaattttggcaccaaaattggtttaaaaatagtgcagctttagacgagattaatcattccttgcaaagcttcgattttattaatgaacaggtatttgaaataaaaaatgaattttaaaaagatatttttgttactgattcttttattatcttttttaggaattggaacaatgctctccaatattgaatctaattatgctgacgaattgctggaagcacacggcttaactaataatacccgctattttagaacagatagtgatgataagattagtactttcctaaaatatttggacaaaaattatgcgaatcatcaaattcaactgcatctagataataattatgaaaaaaaacaagtgcttgtttgggctaatcatgccgttactggcttgccaactgagagtggtcgctatttttcgcctgatgattttaaaggacaggtttcttttgtggtgctggggccaacagttaaacttaatttattagatgtgcagaataataaatatgttattttaggcaaaaattattattctgttataggcgaatttaaggactatccacaggtagaaatggataaatattatctaagtacaggaattgatcagccaactgctaaagaccagctcaagaattatcgaattgtagtagatgcaacacctgcagtgattgaaaagattgctaagcattatcatgctagtttgcatattccgtcttttgttcaagagcatcatcgagatcgtttatctgtcgtgccggatattttaatgttagttgtttgcctattggtcggaatgatcacaaatatgttgcttgcaataggaattaagcgtcaggctcgtttaacacgtctacacgatgatttgctgcgcaattgggtaattaaccgcagcgtacgtttatttttaatagaggctatttttgcccttgctacatacttctttttaagatggcatgccttttattcaacatatggttctttaatagttacattaatagcttcctgggttgtaattgtattggcgttttgtgggatggtctattacttagtgagaaaggacaggaaaattgctaaatctaccaaatgaatttaaaactaaatatgaaaaattattaggtaccaaaaaagcacaagaactatttgcggcgatgaatgaagagagcaaaaaagcttttagaattaatacattgaagcctactaaggtttcatatgagcttactgattcagtaccgcaaataaattcagcctattatggtgaagtatcgggggaagatcctgagtgggtaagcggtagtgtttattctcaagatccagcggctatgtttcctgcggcaattagtggtgttcggccaggagagcgcgtgctagatctgtgtgctgcgcctggaggaaaaataacagcattaggagaacaattgaagggtgagggccttttagtagctaatgaaatctctgcaacacgagtaaaggcactacgggaaaatattgaacgttggggcatcagtaatgccttaattactaatgaaagtccagaaaagttagttccaattttttcggaattttttgatgtgattttagtcgatgctccatgtagtggtgaaggaatgtttagaaaaaatccggaggcaattgattattggtctcaagactatgttttaacatgccagaaccgtcaaaaagagatcctcaatgaagctgttaagatgcttcaacctggcggacgcttaatttattcaacttgtacctttgcaccagaagaggatgagcagattgttagctggttaaataaagaatatggttttacaattttagatacagggatacaaactaataagattgatgttggacagcctgagtgggctgatgggaatcctgatttgactaaaacattacgcttttggcctcaagatggtataggtgaaggacaatttgtggcagttttacaaaaagtaggtaaagctagaattgaaaaaaagagcaaaaacaaaaaagccaagcgtgatccgtggcgcttaaccaaaaatgatcaggaactagttggtcaggtaatggatcagtttaatttaccagttgctttaagtgactggcgtaataaagcaaaagtccgtaatgaacatgtctatattcctgcaatcagtttgcctgaaaaaagtaagcttcatgtaattaataatggagtcgagttgggtatattaaagaaaaaacgttttgaaccaggacatcaattggcagaagtgctaggtaaggtaaagcaagaacgggtttatgatttaccgacaattgaagaataccaaaattatttgcacggtgaaaccgttaaagtggacagtgatttgcggggctttgtgttagtcagctatcaaaaattaatatttagttttggcaaaatcgctggtaatcaagtattgaagaacttttacccaaagggattgagaaaatgataaaactaattgcgacagatatggacggaacctggttaactgaccagaaagactatgataaagaattatttttgcgtgaatttgcggaaatgcaaaagcaggggattaaatttgtagttgctagtggcaatcaatatgctaacttaatgactcgttttcctgaggttttggataaaatttattttgtagctgaaaatggggcattagttgctcaaggaagacaaattttgcatgttgactcgttaagtgatgacatatatcaaactttattaaaaataactactgaatatccatatccagctgtagtgatggggctagtaagtgcttatgttaaaaagagcagtggacgagcttataaacaagaaatgaaaaaatacatggagcatattactgtagtagattcttttggagaaattgatgatcagattttcaaggtcagtctgacagtgccagaagataaaatgtctaaaattttgcgcgaattaaaagaaaaatatccggaggttggttttgtttctggtgcagcagactcgattgatatgcaaactaagggaatgaataaggcagtaggtctagcatatttgagtcaaaaattagggatcaaatcaagtgagatgatagcttttggcgatagcggtaatgatgtaggaatgctgaaatatgtaggccgtagttttgctactgcaacggcgttgccagaagccaaacaagctgcagggcaaattattggttcaagtaatgaaagtgctgttcaaaaagaaattgctaaattgcttgaaattaaataaggaaaattatgtaaagtaaaagcactagtaatcattaactagtgcttttactttacagtaactgatcgatttgagcctttaatggtaaattatagtatttttttatttgtaccagggatgctaaatcttttttgccgtaaacagcaattaaagcagccaattcatttttccaattagtaattaattgctctaatccagtactaccattttggatgtattcttgtaaaaaaacatttgaaataccaacaaattttcctcctagagctaaaccttttaaaatatctaggggattacgtactccaccagaaacataaaatttaacttgctcttgccatgccatcagagcagtcaccacagtaggtaaacctaaatcttctaagtatgaaacgtcactggcattacgtgcattctcaatctgggcaaagtttgtgccacccgaaccggcgacatcgaagtattcaatgccatttacttttaaaagatgaatacttgtttgatccaatccaaaaccgacttctttaataataatgggcaaatcgatagcggtacgaattgctttaattgaatcaagccaacgaaagtcacgatcaccttcaggcatggcaatttcttgtattgtatttaaatggatctgaagcgcatctgcatttaattcttggataatttgtttaattgcagagattggtgtttctggattaacattaacaattagtacaccatctggatcttctgctctggcaaccataaaactgtctagttgatcagtttccttagctaaaatgctggcagatcccaaagctagggcaatattttgctgctgggcaacctgtcccaatgcttgattaatttgtttagaagcagctgagccaccagtcatagcattgataaaaaaaggcgcagaaacatttttgccaaacatttctgatcccagaatagttggatcgacttttgtttcaggcagagcagggcgcaacaaatgcagttgatcaaaactattatatttttctttattaaaaaacatctgagctaacttcagatgttcttcttttctttcagatctaatcgacatagaactctccatcaatgagccatgataatctggtgaaccttaaaattaagaggcataattccattatggcgccattcgctttcaagtgcttcaacatcggtattagcatctgtaatcacaatgccacagtcaccattaccagcaccagaagttttagcagctccaccaaaattttctgcaattttgattaattgcgataaacgtggaatttcaatggcaatttggttaattttggcaaagtgctgcaacaatttacggttagcccgaatttgttgtttgattaaagcaatattgtttgcttcgaaaccttgaaccatctttaaaacacaagctctagaagctgctaagaaatttttatattccatattcaaagccgccttattagcgttagtttcatcaacgaggcgtgaagttgatgctggcttttgactccaaccaatcatcagtttcatatctttaggaggagttagtaattcaacttttaagccaggccaagcttcattaacgacttgaactaaagtcttattagctaattcttgctttaaccattttttgtcaaaagtttggtaagctaaccagccgccatagacactagctgcaatgtcaccagctgagccatttccttgaactgaatagtgtgaaatagccgataatttataaaccagttcattgctcatttttacgccataaaaacgcaagatagctttaactgtagctactgtgacggctgcacttgaacctaaaccatattttttaccatctgcagaatctaagtctgaattgacgtgtaaatcatagactttcatcttgatattttgctcaatacaatattgttcagtaaatgaaatagctgacaaaatatattcaaaagggttgtcacgattatcgattaccatttttgagccctgacgaacccaatgaatcgaatcctgtgagtattgcttggagtgaattaagccagttgcccctttactcttagtgattgacacacgtacaaattggttaactgctactaaaatagcaggacaatcttgctctaatactgcatattctccggcaatatataactttccgggcgctttttctgttatcaaaagaactaaatcctcgaatctaattaacttttttaattacaactagtccaaataagtaattccaggaccaaaacttgcattcactatattaacattattaaattcggacgaaaagcgttgaatgatatctttgctatttcttaattggcaaagtaccttaatatttggtcctgcatcaattgtatagtaacattcaattccttcagtacgaagttgttcaactaatttaatagcttgaatggtttgcggctcaaagtaagtgaattcaggctgtgcagttaaattaattgcatgcatttcatttgcatttaactcagctaactggcctagggcagtgaaatcattactttttatagctttgatcatttcatttaattctgaattgttgcgttcaagccagggcctgaaaaatggagaagattgggcatctttcataccataagtcgaagaaatctttttttgtttggtatttaattcaactgctaaaaggtgaagatccatcgttggtgtttcatctagtgcatatgcgtaagatgtttcgtcgctattacctttttgccaaacagcaaaaccgccataaacggagcggctggcagaaccagatccaatcctggctaaacgagataaatcttctagatcaatgttgatgtcatagcattgacaaaaagcagcagctagtgccgcaaaagcagaactagatgatgctaatcctgcagaagtagggacgtgattgacagatttaacgattaaattgccagtgacgtgaaaacgagcctgcaatttttttagataagcaaaaacacgttgactagctgcagcagtttgctgttgattatttaagaaaaattgattttcaccatctgttttttcaacgctagtatcagtataaaaagcatctaaagtcattgataaactagacattaaaggaagacgtaatttgtcgtcagctttgccccagtacttgattaaagcaatgtttgtatgtgctcgtgcggttctattcattaaatctcctcaatccagtagtcactaattaaatctttacatttagaggcaatttcttgggcgacagtttcgttatcgcacaaggaaatagtaatgccgccaagacctccgcctgataatttaaagcctaaagcgttatttgacaaggcaattttttgcagttggtcaattttatttgttgaaagatcaaatgagtgcaaaatttcttgtgcttcattaaaaatctgtccaactgcttgacgatcgtgcttgatccaagcttttttagtaagatccgctaattcacccaagcgagctatttttttcttggcatagtcggacttttcaagcatttttttaactaaaaaaacagcttcctttgtattgcctagttgaccagtatccatgattaacagggtagctcctaatttggtttgtaatattttaggccccatttttttattaaaaaaaactagataatctgaattaacagtggctgcatcaagaccagaagctttaccatgattgatcatttcagcatgattagttacagtcataatttctttttcagtcatattcagctgaaagaattggttcattgccctagtggtacctaatgcaacagtagcacttgaaccaaaaccatgttccattggaatttcaccagtgtatgtaattttaagtggatggttattgccagcctttttttgcatatgtttaactacgtattttaggccatcatattctgccggtgcttcaaataatggaccgtggtagcgagcggtatccatccacatttgagaagcagattcaacagtagttttaatgtgtaaagccttaattggcatagctaaagcatcatatccataaactactgaatgctccccaataataattaccttgccatgagctaaatagctgcttttcatttttaatcatccttaaactagatttatacaaaagattgcccttgctatgataaaataaaaagcaaggagtgcgaacaaatgatcaaaattcttacaggacgacaaaccgacccattacaagaaaaaattctggaagaagcagttgaaaactatcagcaacacccagaacaagaaacttttatcatcgttcctaatcatattaagtttaccacagaagttagggcaattaacaaattagcaacaagcaaacaacaaactgagactgcagttaaaaatttgcatgttttgtctttttcgcgtttagcttggtttttcttaaaagatgccgagcaaggattgcctaatcaactagatgatgcagctagtgcaatgctcttagctcatattattgagaacaaaaaagatgaattgactatttttgaaaatgttaatgttaattctggattagtaaatcagctttatcagacaattttgcaagtctatgacggaaatttagatttagacgagatatcagaggataatttagatcaagaaactaaaaataaattacatgatttgcggattatctatgatgcctttattaaagaaattgcgggtaaattctctactaagaatgaggttcagctgcaactaaatgaaattttagctaaaagtaaaaatttaaagcaagccagtttttatttctgtgatttttcacatttttcattacaggaaacactaacgattaaaattttgatgcgtaaagcaaaagatgtaatccttgcatttaaaacgcgcttaggtgaaattaattctagtgcggaagaaggagattatgattatgtaatccagcaaactattaagcgcttaacgctgttcttacaagagagaaagatggactacgtgacagcaacttttccgcttaattcgcaatcaaatggtcgtgaaatattaaatagtctttggacggagacaattcctaaagttgacgaattgaagcaggtacaattagttaaagcagactctcgatatgcagaggcttattttgtagcgcggactatttatcaacaggtagcactaagcaactatcgctatcatgattttttgattttagctccaaatttaaaggaatacgagacttatttgacgccaattttacgtcaaaatcagattccattttttaatgatttacaacaggaaatgaagtatcatcctctggttgttttaattgaaagcttatttaacttacatgagaatccgtttcaaacacaaaatatgctagccatcctaaagacacacttgttaataccttcttggtataaggaagaggcggagtatattcatgatgttgatgaactagagaattttgttctggctcatggtattaatcataatttatggaaaaaacactttgataattttgtgaatgctgaagtgatccgcttagacaaaatggatgatgaagtagctaagatcgatcgtttgcgcagctacttggttgataagatttcaacatttttcaaaataatagagcaagaaaaagatagtcaaaaggcgttaacgatattttttgagttcttaactaagaacggaattgccgaccgattagaaaaatggcgtgatgaggccaatgaagccggtgatttacagcaggcgcagcaaccagagcaattatgggatttattaatgcagctgttgcaagactatttagcaattaatcctgaaacttttgatttaaatgaattctttaatatgttaattagcgctttccgagaagcaaatttttcccaaattccttcaacacttgatgcggtaaacctttctgaaatggggatggtacaaactagcggctataagcaagtgtttatcattggcgctactgctaataatttaccccaaattcagaaaatgccaggttttttaactactgaaaacttgaatcagctacaaaatagttttaattcagaatcttacttagaagatagtcaacagcttaataacttagaccaaaattatcagtttggtttgtcgctagctttagcacaagatagggtatatgtatcttatccagtacttaatgcttcaaatgaagagcttgatccttcaatttattatcaacgtttaaaggattatggtgctcagcaatttgttcaacatgatttgccagaaaagatgcaggatcttttgtctttcattactaaccctgatgcaagtttaggctatttaacctatatgaattcaataaattcaggtcttgctgtgcaagagttattaaaaatcacacaggagcaactacctcaaaaaacgaagacagtgcttgaagcaagtgattttgataaccagccagaaaatattggtcaggacttggctagtcaattgtatggtcaaaacttgaattcatctgtgtcacaactggaaactttttatgaaaattcatatgaatatttcttgaattatgggcttaagctgcggcgacggtttgaaaatgaatttgatgttattcaggctggaaactattttcacgagacttttgaccgtttagtgaaaaaactaaacaagcagcataccgacttagcagatttaagcagcatagaactggaacaaatgcttaattcggtgcgaaatgtgatgaaggatgaaggaaaatattctcaattaatgaatgatccttttaatcaatatcttttcaagtgtctagaccatactacttctaaggtagctcataattggcggcgctccttgaaggaaaccccgttacgggctaagtattctgaattaagttttgggttaggtgaaaaaatcaaaggattaagcttaaaagtgccagatatatcaggtcaacataaagttgatttgcgcggtaaaatggaccgggttgatttggccaatttcaatgataaggatcaagttttagcccaggttattgattacaagtcatcagctaaaaaatttgatcttgggatgttttataacggaattgctttacagatggtttcttatttggatgttttgactaaaaatgatcaattttttgctggaaaagatcgtctttcattattgggtgctttttatcaaactgttactagacaattagaacgtttgaatagcaataaactaattgatagtagtttaaatttgaaaaagggagcaactgatagtaagcccaagctgatgtatactggcttaatcagcaatgatccagaaatcttagtagaagctgagccattacttgatgatcatcctagctattcttctgaactgtatactggggttaaaactaaggctagaggtggctttagcttgccacgtgaccgcaactttagtgaggaagaaattgaattactgctagaatacgatgagtatcttattcgacaagcatcaagccaaattttatctggaaaaattgaacttaatccatatcgttatggcaaagcgaagaatgccttaacttattctgattatcgtgatgtcttcttttttgatgcgatgctgcgtcaaaatcaatatcatgaaataaacaatctgaataaaaaagaattaattcttaaaatcaaagagaaattaggaaaggaacaataaaattgtctcaatttactaaagagcaacaacaagcaattgatgatcgtggtcatgatattctggtttctgcttctgcgggtagtggtaagacaactgttcttgttgagcgcgttttaagggagattctttcgggaacccaagttgatgaattattagtaattacatttaccaaagcagcagctgaagaaatgaaaactagaattaaacaggcattatcagctgaattagcaaagccgggatctaatcgcagatatttacgtgagcagctaaatcaagtggatactgctaatatttctacaattgatgcattttgtctagaagtaatccatcgcttttattactctgtaaacttagatccaagttttagtattctaactgatgatactcaagctgcattgttaaaagaacgtgcattacgtgaaattgaaggggagtttctagaaaagaaagacgtaaattttaggcatttttatgataactttgcaggggatagagatgcggatagtccgcgcgacttgttgctggatttgtatgattttgccatggccaaacctgagtatcgctcatggttaaaaaaattggttgatgtttacgtggttaatggcagtatcgtggaatctgatttgtggcaaaaacagattaagccatacttgcttactagtattggcgacttacaagggaaaattaatgattatttagaaaatccagtaatagaaacaaaagagctagctaaggctaaggaagcttttaccttgtttgcacaaaatttagatcattttgtttttgctttagaaaatgatgcagactacgataaacaacgaaaactattacgttcgtgtgtttttacagcgaattatcgtaagtcaagtaaatgggatgaagatgttctaaatttttatgaagacctacaaaagttaaaagatgaagcaaaaaatttggtttttgatacttttacttcattttttgctgttgatgaacaagaacaaattaaagtcatgcagcgcggccaaaagattgttgctgcaattgctaaatccgagctagccttgattgatcggtttaataagctgaagcgcagtgaaaatttgcttgactatagtgatatggaacaattggcttatcagattttgagtcaagatacatcgaattctcaaatggctcgtgaattttatcaaaataaattcaaagagattttgattgatgaatatcaggatattaatgctttgcaagaaaatatcatccagcaaatcaaaaataaagataaaaatacgcttttcatggttggtgatgtaaagcagtcgatctatggctttagacaagcagagccaagcttatttttgaaaaaataccatgattttgccaatgatgataataaacaaaccaaaagaattctgttgtcagataatttccgctctactgagccggttaccaaaattgtaaatcaagtatttaaaagtgtgctaagttcagattttggcgggattgactatcaaaaagaaggacaattaatttttggtgctaagtattatcctgaaaacactcctaaagctagtgaagtaattgttcatgaaaagaaaaatagcagtaatgaagatgaaaatgagatagatttttctgaaattcaaatggttttagcacgtattaagcaactaaaagaagagcgtgtacaaatctttgatagtaaaacaggaatgagagagttacgttacagtgatattgctatcttgactagaagtcgtagtgataatttggaaataatgcaggaatttgctaagcaggatataccattatttgtaactgatgcgaagaattattttcaaacttttgaattgactgttatgatgaactacttaaagatcattgataatcccgatcaggatattccattagtttcagttttacgttcgcctttgtttaattttggtgaaaaggatttagctaaaattcgtatcaagagtaagaactctactttctatagtgcattgacttcttatgtaggtgtaggagatgaattaagtactcgaatcaaagattttttaaatcaactagctgatttgcgcaagtttgccacggcacatcgtatttctgaattgatttggagcatttatgctaggacaaatttattagagataatgaccgcactacctaatggtgaacagcgacgagttaatctagaagctttatatgaacgtgctgcttcatatgagagtgcagggttcaagggattataccaatttatcaattttattaatcggatgcggcaaagtcagaaggacttggcacagcctttattaactaaagaagctggtaatgcggtcagattaatgactattcatggttctaagggactagaatttccgatcgtgttttatgtggggatgcagcataaatatcaaatgcgtgatttaaaaggtaactatgtgattagctcagatagtataggaattacgctccgtgaagaacattatcggattgactctttagttaaagcgatgggaaatgtaactaaaaaaaggcaattattagaagaagaagcgcgaattctttatgtagcattaacgcgggctaagcagaaattaattttggttggcgatgttcctaatctggataaacgagttaaagaatggtcgactgaactaaatcagattggtcaattatcattagcagataagttatcttccactagtccattgagttttatgggacctgcgttggctttagatcgacacctagctgtgaaaatgtctgatattactaattcgttggataagagtcagtcgtttttatatattaattatgaaaatgctaacggtgaactacctgattatcagaaagcggagacaagtaatgataaaacgcaaagtaaccttttaaatcaaaccactaaacggctttatcaatttaattatccgtttaaagatgctagtgaaactacagcttaccaagcggtatctgaaataaaaaaagcattcaacgatccgatcgagaccgaattagagaatgcccacttattgacatcgactaatcgttatttacaaccgattgatactaaacctaatttcttgtatcaaactaagtttactggtgcagaaatcggaactgctacacacatgattttgcagtattatgattatcaaggcaatggtgctgaagatcaactagaagtagaaattcaagaattgattaagcaaaagaaactgaatccagaaattgtttctagtttaaagaaagaccaaattgagtggtttgttcatagcaattttgccgaggaattttggcaaaagccagagaatttaaagcgagaaatagatttttctagtttaatctccgctaaaactttgtttaaaaacttttcagatcctaatgccaaaattttggttcatggtacaattgatggctattttgtcaaaaatgatggtattattttgtttgactacaaaactgaccacgttgatcaatcgcatttatctgaatcaattgaattgattaaagaaaaatatacaggtcagcttagactatatgaacaagctatcaatgaatttagtcaaaaaaaagttattggaaaatatttaattctgcttgatgctaaacaagcggttgaagtgaaatagaggaaggaggaaattatggcaaaaagttttactaaagatacatttgctgtagttgatctagagactacaggaacgcaacgtgagaatgggcatcatattattcagtttgggtgtgctattattaaaaatctcaaggtagttaaaacttattcatttttgatcaatccgcatcgtgaaataccacaatcagttgttaatttaaccggaattcatgatcaagatgtagcaaaacaaagagattttgattattatgcacccaaaattactaaaattttgcaaaatactgttttcgtagctcataatgttgactttgatttgccttttttgaattatgaactagtgcaacatggttatgaggcacttacaaataaagcaattgatactgtagaactggctaagattgcttttccgacttttccatcttataagttgagtgatttgacaacacaattggggattaaacatttagatccacataaggcagattctgatgcttatgggactgcagttttattgcttgaaatttttaataaattagaaagtctacctcaagctacactgaataccctcagttcattatctcatgggcttattcgggatacctcttgggtgattacaacgattgcagataatttacgtcaagaaaaacggcctttaggtaaagaatatatgcaagtgcgtaatattattctgcaaaaacaaaatgataattctgaagcacatggtgggaatgctaaattcccaaagactgactcagagaaacaaaagctatttaaagatcatttacactttcgtagagctcaagtcgacctaattaatcatttgcatcagtttattaatgatccagataaaagggcgatgctaattgaagcacctaacgggactgggaaaactttttcttatctttttgcttatgcttatcagctttattctggtagaaaattagttgtagctacaccaactaaagtgttgcaagaacaagtgattgaacatgaaattccgcagttatttaaggtgattaagttggatttgactgcagaagtagttaagtcaagtagtcgttaccttgaccttgacggatttgtacagacgatttttcaaggtacaccgaataagcaaaccttgatattacagatgcagatactggtttggctgactaagactaaaactggtgatttagatgaattaaatttaactaactataatgcaccactctttgcacagattcaacatccaggggatgcaagagtaggtagccgttttgcaggggtcgatttttggaatttagcgcgtaaacgacaagaagaagcggatatattggtgactaatcatgcttatttggctaaccactatatggatacaatttggggtcagaatccgtatttagtcattgatgaagctcatcgtttcacagacaatgtcgtaagttcgcgtaatgattctttgcgttttgaagctttgtggggagttttaagtcatctccgtaatttgctttatttctcagatgaaagtgttgaagcgcaatttaatgatgatgtgcagctgaaccttttactaaagaaaatagatcctaaaattttggaattaattcagttaattaatgaattacaaaagcaactttattttcaaagagataatgctgttaatcggacagttttagctaatggtaatctagaacttagttttcaaggaaaaagtttatttggcggaaatagcaagtttaaagcgattttacctaagttccaacaaaaattagaagaggttagggacttaactaatcaggttttatttgaattatataatgaacaagaacgcatgctggctaatgttgaggtattagtcaatgagattacggaacaaattgatcgcctagattattactctgaaaagggctatcaattggctgatttgctttctgatcaaaaaggtttagagcaagatggctttattttgatgattactaatcttgatgatccactaagtaccaatttagactggttaatgcttgatgctggtgaagtattaaaacaaatctatagtcgttttgaccatattgccttcgtcagtgctactttaaccagtaatcgaaattttgaatatgcaatcaaccagttagctttaacagaattacatccggttgaatatattggtaaaagtacttttaatataaaaaagcatttacaggtactggcagttaataatatgcctagccctgatagtgaagaatttgaaaagactattgcacaaattttacttagtgacattcaagataagcaccatgtacttgttttgatgactaatttagaaaaaattaaaactgtttttaccatgattatgaatgagccacagctaaaagattttgaaatcttagcccagggattgtctggttccaataaccgaattgctaagaggtttgtaattgctaaaaagtcaattataattggtgctgatagtttttgggagggaattgattttcatgattgtgggattgatactgtttttgcggcaaaaatcccgtttgaatctcctgatcaacctgaagttcgtttaaggcagaagaaattggaagatcagggaatcgattcttttactaaagatagtttaccaagagctgtcattcgttttagacaaggaatgggccgtttaattagaggagaacaggatcatggtcaatttgtaattttagacccaagattatggactaaagattatggtcaagagttccttcaaacgattcctgtcaaagttgaaaaggttactagagaagaattaaaaaagaaattagaaaataaataattatgttacaagatgatacaagacaaacaatcaagtttgtgagttgggtaattggtttgataatagttgcctttctagccagcattgctatcttttattatgctggatctagaagtcggggcaatgatcaaaaagttacgcaattggctactagtaaaacaccaattagaaagattcaaaactattatcatttagatcgcggcactagcagctatgctatagcaggcaccaataataagggaaaacaatattactttatttatttgccaaattctaaaaaggcatatctatatcctgcggccaaaggaatcactgaatctaagattaaaaataagtttaaatctatccatacggatgctacaataaataatattaatcttggttggtataagggtgaggtcgtttgggaagtggcctacaaaaaacaaaacggcaatctaggttatactttatatgaattcaaaaatggaaatgatatctcagaagtcgataatttatagaaactttggtattatggaaactgtataattgatgaaaaggtggataggattttatgacagaattgatttcaattaaagattcttctaaacatgttgatgaagaagtcaagatgcatgtttggttaacagataaacgatcaagcggaaagattatctttttgcaattacgtgatggtactgcatttttccaaggggtagtacgtaagaatgatgtatcagaagaagtatttgatgctgctaagtcacttagacaagaagcaagtttttacattactggtactgttcatgaagacgcacgttcacactttggttatgaaattcaaatcactgatttaaaagtggtttcaaacaatgaaggttacccaattggtaataaggaacatggtgttgacttcttacttgatcaccgccacttatggttaagatcaaagaaaccatttgctattatgcaaattagaaataccatgtttaaggctactgtagatttctttgaaaaagaaggctttatcaaatttgatgcacctatctttatgcattcagctccagaaggtactactcaattattccatgtagaatactttgaccacgatgcatatctttcacaatcaggtcaattgtatggtgaagccggtgctatggcttatggtaagatctttacttttggtccaacttttagagcagaagaatcaaagggtcgtcgtcacatgactgaattctggatgatggaaccagaaatggcttggatgcatcaagatgaatcgttagatattcaagaaagatatcttgcctacatggtgaagcaagttctagaaaataatgaatatgaacttaagattcttggtagagatcctgaaaaacttcgcccaactactgaaggtaacttcgttcgtcttccatacgatgatgcaattaaaatgcttcaagatgctggacgtgatattaagtggggcgatgactttggtgctccagatgaaggctatatttcagaacaatatgatcgtccagtcttcattgtcaactatccaacctcaattaagccattctatatgaagaagaatcctgataatcctaaggaatacttatgtgctgatgtaattgcaccagaaggttatggtgaaatttttggtggctcagaacgtgaaggaaattacgaaatccttaagcaacaaattcttgacgctggtttgaatttagaagactaccaatggtaccttgacttacgtaaatttggtggagttcctcactcaggtttcggtatgggctttgaacgtactattgcttgggtttgtcaccttgaccacattcgtgaagcaattccattcccaagattgattaacagaatgcaaccttaatttggttaataattaaatattgatacacaaagttggactagttattagttcaacttttgtttttgaaaggaaattattttggaatttaatgattatcgggcattaggctttacaaccttacaaaatggattgatcgcttactaccctcaattaggcattagtgatgctgaactaattttgataatccaattggaagcatttagccaacgaggtgagagttttccatctaatgaaaagattgctgctaatactaatttatcggttagtgatgtgggtaatcttattcagcggctaattgaacgaaattatttaactattgaacaaatgactgatagtcaggataaaattggtaataaatatagtctcaataagttgtataatgcacttgatcactatattgatcaaaacgtcttgatcaaagataagaaaaaagataaaactgtttcagttgctaataatttagaaaataatccgttaaattatttgtcacgaaaagtagaagttgaatttggtcgctatctgagtccaattgaacgagaagagattgcgcaatggttaagtgtggatcactatgctcctgaattaattgaacttgctttgcgagaggctgtattgtctcaggcatattctttaaagtatattgatcgtgttttacttaattggcaaaggcatagtctgaaaacaactgatgaagttgagagatttttgaaaaggaatcgataaaaatgacagaagatttattgagtgatgaagaagcacgtagagttttgaaaaaaattttagcattgtatcctgacgcacaaggtgaattgcaatgggatactaactttcatttactttgtgcggttatgttgagcgcacaaacgactgataagatggttaatcgtgttatgcctagttttagtaaaatgttcccaaccccagaagtattagcaaaagctccaattgaagagattgagcatgagataaaaactattggtctatttcgttcaaaagctaaacatttaaaggccactgcgcaaattttggtcgataaatataatggacaggttcctaaggataaaaagttattgatgaccttaccaggggtgggagagaaaactgctaacgttgttttggctgaaggctatggtgtgccagctattgctgttgatactcatgtgtcacggatttctaaaaagttccatattgtagatgacaaagctactccacatgaagtagagaagcgattagaagcaattttacctaaaagtgaatggataaaaacgcaccatgcgatgattctatttggtcgttatacaatgccagctcgagctaaaggcgatccgtattcttatttaaattccgaaaagtaaagccgaaataaattcggctttttttattgaataattttatataatctgttgttactaaattttgattttataatttcaggcctcaactacgtttcggccaaaataaaaacagataacaaaacgctatctgttaataaatatatttaattattgcctagtcattatccgaatcatcattacgttcatgtgattcttcctcaggttttctcgttgatgaactttgttgtgttgaagaagattgtgttcttctttgagaggaagaggctcgctgactgctattggattgagatgatgagccattttcacgacttgatgatgattgagtaactgcagttctagaagatgaaggagtagttccagtattatcgcttgaagtatcagtttcttcatcgtcttcatcataacttgctgcactattaccaattccggctggggtatggcctcgaacaaataattgccaagtgccgccaccagttgctaattctggaggattagagttatttacaattttcgctcttacaactgagctaggctgtttccagtctaggttaggcttattgttcattaggtaggtcatcatactcttatacattagctgtgcagattgttgacctattccagaaatagtaccgtcctttaaattatcgtaaccagtccaaacacccataacatatgatctggtataaccaacgaaccatgaatcttttggagttgaattatagcttgggtacttagctagatcttcatcagagtatttaacagtaccggttttaccagcttgataaagatctgcaatttttgcattagtaccagagcctcgtttgattacgcctttaagcatatcggtaatcatgtaggcagttgatttcttcattacacgtacaccatttgaatcataatttctggttaatccatctggtgtttcaatcttagaaacaaattgcggcttgtggtatacgcccatggtggcaaaagcactataagcaccagtcatttgtaaactagacgcattagcgccaattgctactgataaaccagattttggtgaaacattaacgcccattcggcgagcaaaagctgaagcccgttttactccaacttcagcaagagttttaatagctggaacattacgtgactgctccaatgcatgtcgcatagtcatcatcccgtcgtatttgttgtcccagtcatataattggatattggtaccaggataaacatacttactgtcatcaatcatttttgctgttgaccaattcaagtattgaatagcaggtgcatagtcaagtactggcttaattgacgaaccggtagagcgtccagtttgaacagcccggtctaatcctaattgaacagaaggtaagtgacgtccacctaagattgcaacaacatgaccattgtttggatcaactacagttgcaccaatttgcattttattgtttgtaaaaggtacagaaccgttgttagctaactcgtacagcttgttttgagctttttgatcgatattaatagtaatctttaaattatcgtgatatggatcaaagcctttgctcttaacttcagaaattacctctttaatgtatggatcatcaatttttctaatcttagactcgttattatttcgatgtgatttaagtcccttactaattggttcagcaactgcttgattgtactcagctttagtaattttgtcattttgtagcatagtctttaaaacaatatcacgccggtatttggccttttgcggataaagatatggatcatatgcaacaggtgcattcggcatccctgcaatcaatgcagtttgtgccaaatctaacttacttagtggcttaccatagtagtagttagaagcagtacccatgccataatttccatagttcataaagactttattaatataaaattctaagatttggtctttactgaattcatgttggactttcatagctaaccaagcttcttgagcttttctcttcagagtacgttgagaagcagcagtagagaagaccgttagcttaactaactgctgggttatagtagaaccacctgcagcaatactattacttttggcattagttaacatagaaccaataattctaattgggtcaacgcctaacttatctttgtaaaaacgtttgtcttctactgaaactacagcatcttttaattgctgaggaatgtctttatttttaacataaattcttttttcagaaccaagtgatagtaaaaacttaccattattagtatatagacttgaagatttaccactctgcaattggtcctgactaatgttaggagcatctttggcataaaaagcaaaaagcccgattccagagattactattaaaaatatcagcaaaaagatccatttaatgattctaatccataagtggccactacttggccttcgaccatgatagtctcttcgtgattctcgtttcatattattgttattatctgccatgattatcttttcctatctgcaatgaatttatctaccgccttaagataaggcagtgtaggacgaaagccacttttgatttcaaaagaattgttttcaatttcttttaaagtcattgagcttttatctttttttcgccaagctcgaattacaaaactagctggagtaacaaagtagcgctctaagctagcgaacctaataattgtaaaacaaattccttgttgttttaagcattcgtccaagtgaaaaatttggtgttcatgaaagttttttaatgggaagttagttttattccgtgtttcttttgcctcaaaatcgagatagtatcctttataaacaccattatagtcagttgttgaagcttgcctaaagtaagcttcacgaatgaccgccttagaacgtttgggataatcaactttaacaatttgaattggggttggctttttatgaacaactgcaatttcttccattaaataatatttattagattcattgatttgttgctcaagtgtcatcccacgatcagaaaagttaacaccttttttatgatgatatgatcggtgaactggatgttcatcttttttagttacaggttttctaaatgcggctaaactaccgctaggatatttgaccattgtcctcactcctgttagcattatagcaataaagactacatttttgaacataaaggggggcttaaacaaatgcagcgtttatgggtgactggctatcgcagctatgaattaaatgtttttggcgatcgtgatcccaagataactgtcattaaatatgccctaaaaaattatctgacaagtctactggatgatgggcaattggactggattattactggagctaacctcggtgtcgaacagtggacagctgaggttggacttgaattaggagaaaaatatccggtaagaacatcaataatgattccatatgaagaatttgctaatcgatggaatgatagtaacaaagctaaattcttaaatttgaaggaaaaagtggacttttttgcttcaacttctaataccccttatcaaagtccacttcaattacgtaattatcaaaattttatgattcagcatactgatcgagcattgatgatctatgattcagagcacccaggtaaacctaaatatgattataatttaatccaaaaataccaggaaactaaagaatatccattagatttaattgatttttatgatttacaagatgcagctgaagaataccaagaaaatcatcaaataaatcatttttctgaataatatggtaaaaattttattaaagtctgtttctttattttcagtcagcgttgtttttgctaaaatagggtggaatgtaaaggagttgtcagtaagatggcaaatttaaatgatataaaattatcaggacaagatatattaaagaaacaattcaaaagtaaagtaaagggatatgatcccgatgaagttgatgcatacttagatgaagtaatttctgattatactacttttcaacaaattatcgaagatttgtatggtcagatcggtacgctccaacgtcaattaatggatgaaaagcaaaaagcaaagaaaacagttgaggctgaagaagaaaaggttaagacttatatgccaacgcatagaagaagtgcgcctgtgaagtttgcagaagatgcagatgatactcaaggtgaaatttcgactaatatggctattattcaacggatttcaactttggaaagaaaagtttataatctagaacaacacgtttatggattaaagcattaatttttgctataatgactaacagtgtgaattttgagtaggcgcggctagcttatgttagctgaggaaagtccacgcacacacagactgcgatgtttgtagtgatcgtattcagcctaacaagctggaggaggacgttagtcttcacggcggaaaaagtgctaaatcttcggacatgcattactatcctgaaaagtgccacagtgacgaagcaaggtcagaaatgactttggtggaacgaggtaaaccctgcgagtgtgaaacccaaatttggtgggggagtttcggcctaaggaaatgaactaaaggtcggattattgctttaagcagtaaagatagatgactactgaaggtaatctttgccagagattattggaacaaaacgtggcttatagaaattcacacaggcagagttgggcttttaggtccagctcttttttattttgaaaatgaaagagtaacaatgaaagaataccaactttacgcaactatgggcgctggttttgaaagtgtcgttaataaagaattacagtctatggggtataagacccgtgttgaaaatggtcgtgtcttttttaagggtggtcaagaagatatagttagaactaatctttggctgagaacagctgaccgaattaaaattttgctaaaagagtttagagcaacagattttgataccttatttaatgagatttatgattttgattgggccgaattattgcctgttgacgctaagtttcctgttcaaggtagagctgtaaaatccaaattgcactctgaaccagatgtacagtcaattgtaaaaaaggcaattgttaataagatggttgaccagtaccatcgtcgtggctttttgccagaaactggtaatgaatatcccttagatattcatatttatatacgcatggtgctagttaaatcgttttagttaataaaaaagtccaatcttgttagactcgacttgtaaatagtaataatagaaaagagtctgatctgattgaactgccttaagcttaagcgttttagccaccatttacaagttagttttaaagatttagtgataatttgtcggcactggtatcgtttgtatgcaccggctgagtttactcatcggcgaaatattgatcaaattaaaactacggacagtctgattttggctttacttatctggcaagctaagacaggaattgaatcacaaagaagattctgtgaatgtttcaattgtttatcacactcacgttttaatcggcgttcacgtcagctattgcaattgatttatcagatacggcaagaaatgaataaaaaggttgacctgaatggacatttcttgatcattgacagctttccggtacctgtttgccaaccaattcgcaactatcgtgctaaaatttttcgcggttatgccaacattggttataaggccaccaagaaaatttacttctatggtttcaaagttcatgccattgttagcgatgacggttacattcttgattatgtcgtaacaaaagcatcagttcatgatgccaaggagacagttgaactgctggaaaatgcccatccatctaattactatcttcttggcgacgaaggctatttaggcaaagaactgcatcaacagctaaaacaaatgggttatgaactttggacaccatatcgtaaaaatatgacaggagctaaaaagcacaatgatcatcaattgatggctattcgcagaacaattgaaagcgacttttcgcttctgacctattacaatgccgagaacaatcgagcacgtagtctgataggctttcaaagccggttggaaattgcaattttagcttataatttggcttattgtctagaaagatttaactagcaccacgcgtatttataaaaatgtagctcgaatttcgctagatactacaggcgctagtttgtttaaacgtggctatcgagtagagcatggtggagcccctatgaaagaaaactttgcggccgggctattaaaactaactccatataatggtactcaccccttaattgatcctatgactggttcaggaactttagctattgaggcagcattaattgctaaaaatatagcaccaggaacctggcgtaaattttcctttgatggttttgactggtttaaccctaaactacataatgaagtattggcaaaggctaagagtgaagttaagccgcttgaagcaccgatttgggctagtgatattgatcagtctgttcttgaagtagctaaattaaatgctcacaatgcaggtgtattgcaagatattcgctttaaacaaatcgcagttaaagactttactactgatctagaaaatggaattataattgcgaacccaccttatggtaagcgattgaaggatcgtgagtcggcagaagagctgtatcgccaaatgggagaagtacttagaccgcttagttcgttcagtcagtattacttaactgcagatcctaactttgaaaaatgttttggtgcaaaggctactaagaagcgcaaactatttaacggaaatttgcgggttgatttctatcagtattgggctaacagaaggtaagaaatgattacaaaagagcttaacacagaattttgggtgatctcagatacgcacctaatcgcagatagtttacatgatgaaggacaagccttttcacgcatgcaaaaaactagtcaaggtaaggatttgtattatcaagaaatagccctttctgcttttatgcgaatggcacaaagaaaaaagcctgccgcaattattgtaactggtgatgtgacatttaacggtgaacgagtttctgctgagaaatttgctcaaatttttaagccgttgaaagaaactaaagtgttagttttacctggaaatcacgacatttttgatgggtgggctagagaatttcgtggtaaaaaacagttctatgctggtgaaattagcccaatgttttggcgctcgatctttgataaatcatatcgtgaggccttagatgaagacgataattcattggcttacagtgtccaactgaatccgcaatatcttttagttttagcggattcaaatatttatggaaaagaagagacaacagaagcaccgcacactcacggcgaaattggaaaagtacaattaaaatggattgaaaaacaatttcgttatgcgcaggaacatcagttacgtccggttttatttatgcatcataatttatatgcacataatccagcagttaacaagggctatgtagttgatgacgctgttgagctacgacgtttgtgtgcgcgttacaacgtgaaattagctttttctggtcatattcatgctcaaaatattatgggaccacaagacatgacgcctacaactgagatcgttacatcaagtttttgttctaatgatcaaggctatggagtagtgcgagttcattcacggcacattacatatgtgcggcgtaattttgatatgacaagatatttaacggatgaggaaaaggaaaattatactttagttcattatcataagtatttaaaagatctacagcttggtagtatttctgcggatatgatgcaaagtgaattaaatcagtatcacgaagacatcgagttagttagggcgatggggaatttgtttggctggatgaactatcatttctttaatggtcataatcatataaaggctagcgagttgaataaaatccatgcttctaaagaatatcaagttttgattaagcaccatcctgagtatcggttatatctaaagacgctgtacgacacaagtgatcactctaatttacaagtgaagatacgatactaaacaaattttagtataatggatactgattctaaagaaagcggacatgattatgttaaaagatgaaacaaaatttgatcaattagggcaaaagctttttatgaaaggtgttttgcaagacttcgaaaagaaaaatggtccaattaagggcagaatgatggttacagaaggaaagattccgccggaaatgttaactaagctgcaatctgaattgatgaatagtagtaattggattgtagttgaaggtagttttgatttttataattatactgtcggcatgattgtagatttgactacaggtaagccattagcaaatggatggttggtaccacaattgggtcacccagggatgcaacctgcagagaaatggcaagaatttttgattgaaaaagtcgttgatgcaatcgatgaaaaaggtaagattaatttgccgctatatgtttggatttcagatcgtagtgatttgaccaagacggatcaagatttataaaaatatttttaattatgtaaagcttaaacaaaaaggtaggtcaattttgacctaccttttttaggatttatttattagtattaagaagttattgaattaagtaagtagatattatttaaccagtttaattttcaaagtgagctagttattaattgcctgagcagatttttgagcatcccaccaatcgggtaaatcacacaataacttatttaatgtattattgcggtgcgaaattgagtttctctcattgagattcatttctgcaaaggtttttcctagttctggaactacgaataaagcatcgtaaccatagttactgctaccatgtggatacttagcaattaatccactgattctaccagcactaacaatatcattgctttcttgacctggccaagtaaagacaaaggtagtgtagtagctagctgtccttttttcactagaaactccacctaaatagcctaataatttagctttatcatcttgaccattatggtggtaaggcaagattcctaaagagttaagtagataatcaacacttagacctgagctttctgataatgtaggcaaattggtaaattcagctaaacgatgtgctgtagctctagcattacttaaaaatgttgcctcagaatatgacttttgtggtgcataatctacttcagctaaaccaactactttgataggaagactaagctggttaagtttatcttgtaattcattaattttattttggtcatatgttgtaaataataaactatccattattttccccatgctttcaaaaatagatataccatttatattgtatccgctttcatatactgcacagtcattgtcttatctttgtgaagtaaagtcaagcatagataatagcttttatcaaaaagtccatatacttcaggtttttaaactgaataatgttcctgaattgtcaaattaagtgcaacagttaggttatgaagagatatattgcttgaagagttcctctgctgtgtgatattggaggattcggcgatatttgtggttaatggcatcagttgcctgttgaacataagcttttgacttgtctttcatgctcttgctcttagggaagaattgacgcaaaagaccattgcagttctcattggtgcccctttcccatggagaatatgggtgagcaaagtaaatctggcagcccttgatcttggtcatatccgcaaactcagagccattgtcaaacgtgattgatttaaaccaggcaggatgtctgtcaatctcattttgaagcagcctttggcatgtgcttgcccgatagtcaggaatcttgataactacttcaaagcgtgtggttctttcagtcaaagtcattaaagcaggctgattcttgcgtctgacgcctttaaccagatctccttcccagtgcagcggagcttttctgtcttcaacctccttaggacgctgttcaatggaattgccaagatgcttcttgtgcaaagcgtgaccgccatggctgtgatgacgcttgttcctgcgtcttttgagcttcataggcagatcaatattgcttatgtccagcaagccctgatcaatatagcgatagacggttggtgtgctgggacaagggtagcctggcatagtccttttgaattcaccaacgaactcatcgatgctggtggcatcaaatttagctttaaagcgtctggagagcattctcaaaaagacagcataatgcttcaatggattgcgctgatagcagtttttgcgacgcttctcataataaatctgtgcagtatcagcgtaatagtgctcatacaataaatagctgctgtctctttgcaggacgcttccgcgtttgatttcgcgactgattgtcgacttatggcagccaacttcttgagcgataacagtacgggaagttatgccggaatccagcattgcttgaatttgtccacgttgtacgctggttaattgatgatagtgcttagaaatgctagaatttgaattggtcatgaagatcttcctttcttgatttttcgtcacttcaagtttaggtcttcatggcctttttgtttaacacttagtgttgcacttcaattttaaatccgggaactgaataatgttatttttaatgactaagattgtgaaaattatagaaactgtcaaatcttttgtgtaaatagatctttctcgtaaattgattttttaattatttatttaatcaaagtaggattctaaggtgtcctgaacctgaccaaagcctttatgaattcgattgaaataacggtcattgtagctcattgcctgaatgccaataaaagcatcaagcgactgttcagttggaaactctgccttaggcttagctttgcgcttgatcacattgttaaatgattcaatcatgttagtcgaataaattgaagctctgatctgcttgggatagttataaaagaccagcagatctggttctatgtctttcaagcttctgataacatggctgtaaaccttgccccatttggtatagaagtcatgcaggacagctgtggcttcttctttgtttgtctgttgatgcacctgtttgaattcgttcatgatcttttcacgatcgtcgacgcgtactttagcgcagatattgcgcatgacatgaaccaaacagcgttgaaaatgagctttaggataagtcctggccaaggctgttttcatgccaacaacaccatcagaaagaaaaagctcaacttgctttaagcctcgggatttcatgttttgaagcatatctgtccagacttcaatgttctcgctaggcgcaatgcagtagtcaatgacctccttgtgcccattaggcttgatgccaatggcaatatagactgcttcacgctcaaatgtttctcggcgcaaaggaaggtatgtcgcatccaaatagacgcagaaaaacttgtcgcttagcttgcgtttgtggtaagcctcaacctttggaatcatctgcttggaaatatttgatacctgagctggactgtaatggctgccatacatcttttcaattagatcggctatttccctggtggtcacgcccttggagtaaagcttgataatcatgctttccaagatatccgagtgctgcttgtagccaggcagcgtgtgctgatgaaattgaccgttgcgatcccgaggcacttgcacttcaattgggccaaattgcgtatcaactttgcggaaataagcaccatttctagagttgccagtattccagccatttctggcatagggatcatagcccagaaaggcagtcaattcagcttctaacaagttattaacagcctgttgtagctctttgcgcaataaatcatttattttgtctggattgaatagagcttgagcaaaatctttggtaaaatcattcatgaaggagttcttctttctgtatgtgtttttttgttcaaaccaatcatacgagaaaggaactcctttttctaatgtttaaagaaataaatttaaggaatcattcatccttacacaaactattttacagtctcgattaatcaattaataaaaaaataaaattgtattttaataaaaaagagaaaatcttttttagattttctcaattatgattaactagctattaaaaatttccataatgcattattggtgtaccagttttgcggttgaattgctcctagacaggctacaataatataaattgctaatgttgagattatgaatgcaatgcctaagttgacaatgttgaatggaaaggtagttttatgttgtttcattgcgatgtgaatggcgaaagccaacagaaccaaacctataataattccaaattgataataaatgctcattttctctcctaagttacagttaaaagtatacgttaaaatcggattaaagagtgatttttatttatctagcctctttattttatcaaaatcaatgttatattagagaggtagaaagaagattatgtacatatgtctgtagatatttacaatgaaaaacttgaaccatacgacgatggtaagcgtcataaatttagtggtacttttgatagattaaacgatcgcttagctatttttaaggatttgcgtattgcaggtgctggtggcaatccaattgttaagcagttagcactgcattacttgaaaactttcaaagaccttgatttgaagaggggcgatgtagttgaatttgaaggcatggttgaaaaagattctaacaatggcttcacaattgaacgcccaactcaagcagaaaaaatcagatcagcagctgccgatgatgctaaagttgacgtggttggcgatgattggaattggtttgaaaattagttaacggaagtgacttacgagatgtaagccgcttttatttttgaaatttaagtcatagctagaaatgtagtaaaattaagcttgtaaggagaattagatgcactttgatatctttaatcgaaaaactgtctcaactgataaaatgtttttccagacaacattaaatcctaagcaagcaataatcattggcaatggtgctaaatttcgacgttgggttttcttttctactaattttgctacattttatgtaatcattctgtcagctattagtattttattaattaagtctaatgtttctgtactaatttgcttactattagcattagcaaatttagtaattaatcgctcaatacctcgttattggcaaactttctttggcccgaatgctgaatatggaaaaaatcatcgtccagctattttgcctattttatatatcataaccttgttcggttggctttggagcgtatcacatttcgtaggatctttaacttttattactggtacatttgtgctagtaggtcttgcaggtagtttgttatcgctctggatatggatgaatttgaatactgttagttgtgctccaatcagtgaattacaatggcgaaacaatgccaaacgcaggggaatgtctgatgaagacattgataaggttattgctagtttaaaaaagcgtagagcaatatattttagtaaacacgataaataaaattatagacgaaagatagaatttaatgacagattttacagaatttgaaagtacaattttttcatcagacgataattttgccattcgaaaaattaaacataatgtcattttgacgtattgcactcaagatggtgaaaaagaatatgaaagcctaagtaagaatacatatcgtgtattttttgaaaataatcttgaagttagtcgactgtatccacctgatgaattcagtcacaattggctaatccaaattttaatgccgcaactttcaattgattcgctcaaatctatggcgattgccttaactacattagaaagaattgcgcaaagtcaagaaggcatgcaattatctgaatatgttaaaaatagtgagttagtagaaataaagtcctggtttgatctgcgtaataagttgcgaaaaatatccaaagcttatagcctaattaagcaaagtactgatcaaacaacacagtggctaggaagtgatggacatcgttatcgtgaagtgattttagccaatagtttacggcttaattatggtcaagatgaagttgttcgtttaattccaattaaaaataattgggttattcagtttgttaaaactgatttcagtgcaactgatggcgtaattgatcagctttttgcggcattaacattattgactcaatatgtaaaacaaatttaaatcagagatgaaacatattctttatgcccttaatgggacttttttaatgttactcgttccggctttatttgtattagcattacgacaattaagccatgaagctaaccaaaaattggtaaatacatttggttttaatagtcaaattattgttggcggattaggaattattgttcatgaacttagtcatttgattatggctataatttttggtcatcatattaatgcggttagtttattgcgcatccctagtaataccaatgatatgtcacttggctatgttaaacatacttggtctcctacatctacttatcaaaaggtgggtaatgcttttattggcattgcacctgtattaggatgcaccttgctgatttacataatcatgcgtacattgaatacacctatttcattggttcagaatcagcttactactcagttattaagtaatggtaatgcacttaactggaatttcttaactcatagttggatttatatttttgaattatttcagcttaattttgattcaatatggcactcaattgttgctttattgctagtaatcagtctatgttttggtggattcgatttaagcgaggctgatataagtagtggcaaatatgcttttttaggattaattggtataacctttattatgcttctcttagtttcttttctaggctttcacgctgcattattaccgtttttagttaatattactgtctggatttatttggtattcattatatcaatagtgattttagcaataattaatttaattatgtatattttaaatattattttataaaggagaaaataatggcaaaagcgttattagttatcgactatagtaaagactttgtagctgatgatggagctcttacttgtggccagcctgctcaagcaattgatcaacgtattacagaactgtgtaaacagtttctacaaaataaagattgggtgattttcccgatggacgcgcacttaaaaaatgatccatatcaccctgaaactaaattatatccaccgcataatattattggaactgctggccgtgaagtatatggtcaaacgggtaaatggtatttagaaaacaaagataatgatcatgttttattaatggataaaaatcgttattcagcttttcaaaatactaatctagataattatttacgtgaacgccatattcatgacctgacactaactggtgtttgtactgatatttgtgtattgcacacagcgattgcggcatataatttagactatgaaattacaattccacgttctgctgttgctacttttacatcaaatggcgatgaatgggcaatggctcactttaaaaatgcattaggtgcgaatattgctgattaatttaatggcctgcataatttactagtaagtccaattattactatctaataaaaatatacattataattaatgtaaaggaaaaagctatgtaaagtgaagaggtcaaaatgtatacaaatattcgtaaatttaaaaagggcggaaactacccggaacagcaaaatgggctaccacaagcattttttcataatcccaagtataagaagttaagccccgatgcatgatacctatacatgatacttacgatgagaatgattgattcacaaaccaatggatgggtagatgctgacggtaatatgtatattatttattctaatcaagagctaatggatgacatgcattgcaattcttatacggtgaaacgactaaagaaagaattggttaatcatgatttgttactcgaagaagatgctcctgcagaacatgatgataggttatatcctttaagaattaatgaaaacgaaaaatgataaaagacattggtaaatacggcaatgtcattaagttaagacattgacaaattatcgacttggacttttaagatcattcatttgcgatttatcgcatttgaatgctcttttttcatgccaaataaacccaaatcttgtttagaaattaggctacacgatataaataatatacagctgatttgggtttgagatttcttttgtcttttcgtcctggtctgatcggaattgtgtaatgactaatttgaataagaatctttttaaagatttcagttgaagaagaaattatatacatagcctggatgacaaaacatgactgtttgaaattgatcgcatattgatacttgcattttttttgtggtacatatgcttgagcatcaatttgactgactgcgttaaacataatcatgtgggcatagatctccatttcaataaatctatcctgcttggaatgaaactgtacgctacctaaagcatatttcaactttttgaatgaagtttcaatgccccagcgcaaatggtagatttctttgatcctttttaagggataatcggctctatttagattagttagaacaacttcccattcttctttgcctgatttaggatcattaattctaaatttacaggcacgaaattttattgtacataactctccaaagtcccagctgccatctttggtatttttagaccgatattttatatattgacggtaatgatggttaaccaaatgaacgttttctgtagccttatgggtttcataataataattagaggtagtcacccagcaagctatatccttatcacactcttgattaggcaactcagctacttccttaaatgcgccatatcccgttttagtacgtatgacataataacagttaggcaggcgattacaattttcaatcatgttaaagccggtataacctcgatccatagtaactatatatggtccgcaatttagctttttaagcatttgaacggcggctttacgttcatccatctttgacttaggctgaaagatgcagtcttgataagtattatttaacaggtcatagagtgcattaacatgaatttggcaatatggctttcctttatgattgagatttccaacgatattctctgatttaggattccagatttgattaaaatcagacccatcaatggcaaatatacgatatttatgatcaaataactggatattaaataaattctgattaaatacagttagaatatgcttaaaacatgcgggtgaaagctgacctttgcgttggacataagcggaagtactgactactttatcgttatttttaatagctttttggccaaaagctctaaacaactcactggtcaaatcttttccttgcatattaatagtagttttaatgactgtagctgcatctaaaaaccgcttcctagtgaaggcatgaggatcatcgataaaatcatgaatatgctttccagtatcattgataatttgatcaagacgatctaaaatatttctgtgaagggctttcataattaacaccagctttctggcaataattttgaaggtttaataatttaatcagagggcgaaaaggtaggttcttttcgcctttattttatgcaaaaaaagaaccaaatcataatgattcggttctacagagattagattcaatttgtcaatgtcttaacttaatgacattggtaaatacggccaatgtcttttatttagtattagtaaagaaaataactaatgtatccgcatcaggataaggctctgaatgaacacttaagaaattttgcagtttatgattgtattcaatattattttcactttgactattttgataaatttgctctagccagctcggttagccggataaatagcattgttcatggcggaacctacagcgttactttgaacgtcatttagtaaatatgatgtcccaatttgattaatttgattaatttgattaatttgattgagtaaatgatctatgcgttctatttcctgcttcttatcatgtacgtttggcacaagcagtagagagacggctgtaatatccatttcacattgtgcccaaaatttatcataaagcttgctaaagttttgatctgattgagctaaaagccattcctggtagatttttaaaatacgaattgttttttgaatatcatataaataaagcttacgataactaaactgctgaaattttcttgtaattccagaaagtagttctgtatagcaatctaagtcttcagcaattttaattgccgagtcatttttatttcctttctgtattttatttacattagctgatacttatataagtctatatgataatactgtactttctatacttttattataagatcatcgcatgatttgttaataataaaatgctcactaaaaatgttgtgacaatttattattaacaactaaaaaattatgatagtgtaagtagtaataattatgaaagagcgtgatgtaaatgtctagatggcatagattatttcctgaacgagtttttgatcgtggagaaatatattatggcaatgatatggttgaaaatattcaattagctcaagatcaggaacactttaccgctcaagttcaaggcggaatgggtcgttcttatactgtaactggtcgtcttcgtttagatggtcgagcttcagagttagactgtaattgtccatgggctaataaagggcatcgctgtaaacacgaggttgcggctttacttgcagtagaaaacgaacaagaaaatgaacataacgttaaagtcccttttgctgacttaatttctgaacatcttaagcaaatgattgcacataaaagcccagtacttaaccccttaaatttgattggcaatatgaaatttaccaaaaaaagttatgatcaggcactggaacttaatgatcactggtcgattagtagttgtcggcattttgatgataagatgcgtaaatatgaatatttttgggagatagtaacagaggacaatgagttaattacattatctgtgcaatttactcgctggcaaattatatcaattaaatttgatagtgatttttcccgtattgaaaaagatagtgttagaatattagctctgttttactttattaatgagtatcttgatgacgatccatttgatttaactaaccaggccgctgaagatctacttgaattttatagtgacgcttctacccaaaatgatgagccgattattttgcgggcaagtattgataagtataataacatccctagtttgacgtttaaattaggaaagaacaagcatctttataaagttaaagatcttaatcaactagtagatgcatcccgacacagctcttctctaaagctaggtaagtttttcaacgagcctataaatcaggctaaaatggatattgatagtcaacactggttatcttttattgaaaaaattatagatgctcgtaatctaaacgaagaattttattataattacagtagtcaggttggtcgcattacactagagaactctgtggccgatgaagttaatgatttactttatcaaggcgtaaagttgtactcaaatgagcagcctataggatatacaactgatcaactagatttaaacattaaaattgaaactcaaaagtcatctgctttagttagtgtagaggatcttccagtttctactataattactgggagtcatgcgtattatggctattacaaagatgtatggatcaaatatataggtcttacgcctgcttctttgcataatttaggattgcagcctggtgctgaaatgcaatttagtaaaaagaccgttgctaagtttgcacataatattttgcctaaatttgagcaaacaaagtttatattagtgtctggtactgatgaattgaaagctattttgccaccagaggcccattttttgtttaaattagattatcgtgtaggcagtattttatgtgtggctcgagtacagtatggggatgcacaatacgagttaaatcaaggatatactgaagaggaccgacgcgatgttgaaaaagagaccgcagcatggaagcacattaatacatattttagtgattatcagcatgggcggtatgttttatccaatgaagactcggatgtcgtacaagcttttctagatgatggtatcaatgagttgaaacgattaggcgaagtacaaattacagctaactttagatcacttttaaagggaataaagattaatttggatgttggagtaggtatcaacctgactaatgaattattagatatcgatcttgctgatcaaaagatgagctgggaagacattcaagcggctttgaaagcctaccaagaaaagcgaaaatattttgttttaaaaaatggaatgctagctaaggcagaacaaccgacaattgaacaattggcacaaactttgcatgatttaggtattagttttaaggatttcattcacggtaaattacatttaccagcatatcgtgccttttattttgctaagcaaatgaaagctgctaatgcactgcatttctcaactaatgaatcctttaatactctgattaatgatttagctaagaatcagttgaagcaaaatcaaataccagttagtttgcaaaatattttgcgtccatatcagaagataggttttaattggctaagcactatcgttaattataaatttggcgggctacttgctgatgagatgggattaggtaaaaccttgcagattattagtcttcttttagctcgcaaagaaaaaatgcaaaatcagttacctagcttaatcgttgcgcctgcttctgttatctataattggcaggcagaagttaaaaagttcgcacctagccttaatgtggctctattagatggcactaaaaaagaacgagagagattgcttttagatgctaaaaagtataatctgctaatcagttcatatcaatcgcttaatcgagatctagaagcgtaccaaaatctaatttttgatgtagaagtaattgatgaagcacaaaatattaagaatcagcaatcagttaccgccaagacagtcaaagtcattaaagcgcatcataaactggctctaacaggaacaccgattgaaaataaattgagcgagttatggagtatttttgattacttaatgccaggttttttaggtttatatcctgactttaggaaaaagtatgaattaccgattgttaaagagcaagataaagaagcagaagatcaattagctaatatgataataccctttatcttgcggcgtctaaaaaaagatgtgctacgtgacttacctgacaaagatgaagaaattgtgcctgttaaaatgaataagaaacaagctgatttgtataatatgcagacgcaaaagattatcgctcaattaaatggacagggggatgaagactttaagagatcacgttttcaaattttggctcagattactaaattacgtgaaatttgttgtgatcctcatttgctttatgaaaactatcacggcaagtctaataaattaattgctacaattgagttgattaagaataatctagcaaatggacataaaattttattgttttcacagttcacagctatgctagatattttgcatgaaaaccttgccagattaagactacctttatttactattactggatcaacacctaaaactaagcgtcaagaacaagttcaaaagtttaatcaaatggctcaaccaggggtctttttgatttcattaaaagcaggcggaacaggcattaacttgactggtgctgatgttgtaattcattatgatccttggtggaacttggctgcagaaaaacaggcgacggatcgagctcatagaattggtcaaaagcattctgttaagatttataagatggttacagaagacagtattgaagagagaatcattgctttacagcaaaagaaagcagaattagctgatataattttgcaaaatgatcagattgctgatgcaacaatgagtaaagacgatttaattaagattttgaaataaatagatcattataataaaataaaaatatttgtttgtacttgcgaactattgtttgcaaaagtataatatttaggtaaacaaaaaccaacaagctaaatgcttgctggttttataattttagtttgagttagtatgtttctttttataccaatacactagaccgaatggaaccagattctcttggtgatgttcgattcgaataatattgcttcggtgactccagtaaattaagattacgagcaatccactgataatgctcaaggcaagatcgtggaaaaagaatgaagcaataaagattagaactactgagatcaaactagttaatgaaaccatacttgtaataaataagatagggaagaagattaacgcacagatcaagaaaaaatggacattatatcctagtaaaaatccagcggaagttgctactgccttgcctcctttgaactttaaaaagacaggaaaagcgtggcctaaaattgcagctaagccaaaaatcaagcaaagataatgtggtcctagtttaaaaattattggtaatactgtagcaaaagttcctttgagaaaatctactataaagacaatgattccagcagctggtcctaatactctaaaggtattagtcgttccgatatttccagatccgtatttcctaatatctttatgaaaaaagatattacccactaacacacctgttgggaatgatccaatcaagtatgctaaaataaacaacgatgcaaattttaatgcaaacatatttaacaacactcctattaatctatcgctattttagcaaagattatcttttaaatatatggtgctggttaaattaatgaacaagtggaggaattttagtggcaaaagctaatacttatgatgattcttcaattcaaattttacatggcctagaagccgttcgtaaaagacctggtatgtatattggttcaactgatattcatggtcttaatcaattagtgtatgaaatcgtcgataactctgtcgatgaagccatggctggttttggtaaagaaattgatgtaaccattcattcagataatagtgttactgtaagagactttgggcgtggtatgccgacaggaatgcacaaatcgggtaagcccacaattgaagttattttaactgtattacatgctggtggtaagtttactgaacaaaattataaaacttcaggcgggttgcatggcgtaggttcatccgttgttaatgcactttcaagttatatgaaggttagagtcgttcgcgatggtaaagcttatgaagaagaatttaaagatggtgggcatccggtaggtacattaaagtgtgtaggaaagacaaaagagccaacagggactaccattacgtttaagccagatgagactatcttttcaaccacgaagtataagtatgagacaattcaggagagaattcgtgaatctgcttttctacttaaaggggttaaatttgtcttaacagatgagcgtgagccagaacatcatgatgtttttcagtatgatgatggaattaaatcatttgttaagtatttaaacgaaggtaaaggcacaattagtgatgtcttttattttgaaggcaagcaagatggcatggaaattgaattttcaggtcaatatagtgatggatattcagaaaatttagtttcatttgttaacaatgttagaactggtgatggtggtacccatgagtcaggtgctcgtagtggatttacacgtgcatttaacgattatgctaaaaagcagggtctactaggtaaaaaagataaaaatattgatggttctgattatcgtgaagggcttagcgcggttttatctgttaaaatccctgaagaattacttgaatttgaaggacagactaagggtaaattaggtactccacaagcacgttctgctgtagattcacttgtttatgagaaaatgtcttactatttaatggaaaatggtgagctggctcaggaactagttaagaaggctcaaagggctagggatgcacgtgaagctgctaaaaaggcacgtgatgaaagcaggaatggtaaaaagagacgaaaaaaagaagttttgtctggtaaattaacgccagctcaatcgcgaaatcctaaaaagaatgaactattcttggtcgaaggtgattcagctggtggatctgctaagcaaggtagagacagaagatttcaagcaattttgcctcttcgtggtaaagtattaaatactcaaaaggcaaaattgcaggatatctttaaaaacgaagaaattaataccatgatttataccattggtgctggtgtaggaaccgagtttaatgttgatgactctaattatgataaagtcattatcatgactgacgccgacgatgatggtgctcacattcagatcttgctattaacattcttttatcgttatatgcggccaatgattgaacacggaaaagtttatattgctctgccaccgctttatcgcttacaaaaaggtcgaggcaaaaagacgcaagttcaatatgcatggactgatgaagaactagctgatgatgaaaagaaaatgggacgtggctattcgctgcagcgattcaaaggtttaggtgaaatgaacgcggaacagctatgggctactactatggatcctaaatcgagaatgttaatcagagttaaaattgacgatgctgctcttgctgagagacgagttactaccttaatgggtgataaagtagccgcaagaagaaagtggattgaagaaaatgttaaattcagaatgggcgaagacggctcaattctagaatccgaagatgaataaaagaaggttttaaatttaatggccacaaaagaacgaattcgagaaatgccacttgaacaagtaatgggtgaacgttttggacgatattcaaaatatattattcaagaacgtgctttgcctgatattcgagatggcttaaagccagttcagcggcgtatcctttatgcaatgtatcaagatagtaatacttatgataaaccatttaaaaaggctgctaaggctgtcggtaatatcatgggtaactttcaccctcacggtgacagctcaatctatggggctttagtgcacttatcacaagactggaagatgcgcgagccgttagttgaaatgcatggtaacaatggttcaatggatggtgatggtccagcagctatgcgttatacggaatcccgcttaagcaaaatctctaatatgcttttgcaagatattgataagcaaaccgtaaacatggtgcttaattttgacgatactgagtatgaacctacagtcttacctgcacgctttcctaacttattagttaatggatcaactgggatctcatctggttacgctacagagattccaccacataacttaggtgaagtgattgatgcaacaatttatttgttgaaacatcctgatgcttctcttgaagatttgatgaaatatgtaaaaggccctgactttccaactggtgctattgttatggggactaagggaattaaggaagcatataagacaggacgtggtagaattcaagtccgtgccaaaaccactattcaagaaattcgtgggcataggcaagaaattgttgctacggaaattccattcgatgttaacaaagcactattagtaaaaaagatagatgaaatccgtctgaataaagaaattgatggaatcgcagaagttcgtgatgaaactgaccgccatggtttgtcaattgtgattgaattgaaaaaagatgctgatgcgcagaatattttaaattatttatttaaaaatactgacttacaagtatcttataacttcaacatggtcgctattgatcacatgactcctgttcaagttgggctaaaacgaattttagcttcttatttagaacatgaagaagacgttgtaactaaacgtacgaaatttgacttagataaggcagaagctagattagagattattcagggcttgattcatgccatggatattttggatcaagtaattaaaaccatccgcgcttctaaaaataaagccgatgctaagaagaatttaatagttaagtataaatttactgaaaaacaagctgaagcaattgtttctttacaactttatcgtttaactaatacggatgttaatgaattaattgctgaacaagacaagttaaataaattggccgaaaaataccgtaaattattatcagatcgtgcaactttagaaaaagaaattattaaagagttaaatgcagtcaagaaagaatttgctaatccacgtcgaactcaaatttcagaagaaagtgctaaagttgaaattgatgaaaaagccttagttgctgatgaacaggttagagtactaattagtcgagatggctatttaaagcgttcatctttacgttcatatcagtcaactaatgatgatgacaatggtttaccagatggtgacaaagtagtttatgaaaacacactatctaccctgactaacttgtatttatttaccaataaggggaatgtcatttatcgtccagtacatgaactaattgaaaccaaatggaaagaaacaggacaacacctatcacaagaaattggattagacagtgatgagcaaattattcgcgtctttgtatttgataaattgaatactgattgcaactttattctggctactaatgacggttatatcaaacaattggagttagctaacttacagccgacgagaacttataagtcacgtgcaatgacagctatcaagttaaagggaaaggatagttatgtggttggggtagatttgatcaaatcagataatcataaggaaatcacattatttactcatcgcgcctatgcaattagatatgatgttagcgagataccaacttcaggagctaaagcagtaggtgttaaatctgctaacttgaaagatgacgattatatcgtaaattatgtcctagttgattctaagtacgttgatttaatgcatgttgggctaattactcaacgtggggcatttaagcaattcaaacttaaactagttaataaagtttctagagccaagcgaggggtactagtactgcgggaattgaagaataaaccgcatagaattgttgctctaatgccatatgctcaagatcatttgttacatgtcactacttctagtgaccgtcatgtaaatattaaaactacggattatccattaggcgatcgttattctaacggctcatttgttattgatactaccgttgatgggacgcccgtaagtattgaattgggaagacccattagtagtcaaaattaagatttgagtttaactaaaacaatatattaatctttaaaaacagtgttaagacatatgttttgacactgttttggatagataatagcagtgttatgggacatggcttatcgtaaaataatattttaggaaagagataatcgttatgtctaaaagtgatactattttatcggctaaatcattgcgttattttttacaattgattgagacgatgaattatacccaagctgcacaaattttaggtattacccaaccggctttaactcagcaagtaaaaaaattggaacgcgctattggtgctccattatttggacaaatggggaagaagttatacctaaccgaagctggtaaagaaatggaagcagcagcgatagagttgctaaataccattaatggtgttattagtgacattcaagaatatacccagtcagataaaggcaatatttcaattggtattctagagtctgtacatgttgatcttttctaccaatttttacgttacttcaataaaaagtatccagaagtaacttttaccgttgattactttgaccgcaaagagctatggcacagacttgattccaatatgattgatatggcgattatgtatatgccagatactactaataaaacaggagctaatttccgtcatcaatacaatcatcgtgatatttgccctgagcatattgttgtactgactcacaaggataatgtggaagcagaagggacatattctgttactcgttttggcaacagaaagtgggttgcatatccggagaattactacttatcaagattaatgcgacttaactttagtaaaaagattgatctcgttactccgtttaaaattgcatctactaaggaaatgatcaaaattgcagaaaatactgatcttgatacttatgtagatcagacttactacgaggcgcataaggatgagattaatttgactcctgtttatattaaaaatatgcctgagtttacgactgcttgtgtttatcgtagaggaaaattagatgttcctaggatgaagaaattactaacggaattacagattttcttagacaataacttggataggaacaataattttagtaaactattaagtgaagaaattaaataaaataattagaaaaagaggcaatttatttaatggaaaaagaatttgtttttggacaccaaaatccagatactgatgcaattggcactgctattgcattttcatatttgcaaaacaagttaggttacaacactgaagccgttgccttgggtgagcctaatgatgaaactgcatatgctcttaaaacattcggctttaaagcacctcgtgtaattaaagaagctgctccagaagttaaatctgttatgttggttgaccacaatgaaccacaacaaagtgtttcagatattgacaaagttaaggttactcatgttgtggatcaccatagaataatgaattttaatactgcagatcctttgtactaccgtgcagaacctaagggttgtacatcaactatcgtatggaagatgtttaacgaaaacaatgttgaaattcctgaaaaacttgctggcttgatgctttcagctatcatttcagacactttgcttcttaaatcaccaactactactgatgaagataaggaagctgtagaagctttatctaagattgctggtgttgactacaaggaatacggtttagcaatgcttaaggctggaactaatatcgatgataagtcagaagaagagttaatcgatttagatgctaagagctttgaattaaacggtcacaatgtacgtgtagcacaaatcaacgttgttgatttatcagatgctttgaagcgtaaagatgctttcttgaaagctatggaagcttcatcaaaggacaacaactatgatatgtttatgcttttggtcactaacattcttgattctgactcagaagctttagttgtaggtagtgacgagactaagactttatttgaaaaagcatttgacaagaaacttgaagattcagaagttaaattaccaggtgttgtatcacgtaagaagcaagttgttccaccacttactgatgctttcaacgcttaatttaaagtggacaaataagagacagttgatataactgcctcttattttttatcattatatgaaaaagctttttaatacactagttgcaattagtactattgtaagcatcaaaaacttaagtatcttttttagctcccacttttcggttatccttgtctcataaaacttaagggggcaaagataatgcttgaaaaaggcgaccttgaactaaatttttatagttccctggattctgaaattatgaataaacttttggaaaaagtactgtcatgatcaatctttatgatctgggccaggtctattttgtctgtgggcggaccgatatgagacgcggaattgatggcttagctgcgatagtcaaagataaattcaacttagatcctttttctggaaaagtctttattttctgtggtggcagccgtgatcgtttcaaagccttgtattgggacggccaaggctattggctgctctacaaaagattcgaaaacggtaaaattgtttggcccaacaatcagaatgaagtcagggttttatcggatgagcaagtagactggctgatgaagggcttctcgatcgaaccgggaataaaaacgacaaacgcacgcaatttctattaattttgcgtgcgtttctggtatgctttagtttatcaaaaaaataagaggggggatcccaatgactaaagttgaaacaaaagatgagaccatccaaggcttaatggctacaattaataatttaaacgaagagatcgccctcctgcgtgaacaagtagcctacctaacgcaaaaacgctacggcaagtcttaagaacaaatgcctttatccggccaaaccagcttgtttgatgaagacagttttgacagtgacgaagacgaggcccttccctgttgaaactgaaagaatcgtttatcaaagaagaaagcaaaaggctaaggaatttagcatcaactacccaattttggcaatggaacagcttgacagttttactatgagaatatgcagacgcaataaagactattgggctaagaaaaaataccaatcataaattagccacttttcagccagcttcatttggaaaaatgatggaatatatttaccaagacgatggacacctgctcttagaggtagatagttatgataccagtaaagcttgtcatgaatgcggaatggttaatgaaaaattgaaagttggagaaaaagaatggacctgtcctaattgcggacaagtcctagttagagattataacgctagtctaaatatcagagactgggcacaggatataacgaaacatccaaagcatggtaaaactattaacggaagtaaggttaaagattcagacctacttttagtattttaaataaagaaaaaacttgacacagacgagcctttacataaggcattagatattaagaggtactggctgggtttagcagtatgaaacaagactgttataaagccaccaatatctaatgctgtaagaatatggaaataaaggtatttatttctgaaacttgcgaactatgttcgcgaatgtgtcattgatctcatatcaaggcgatgttaacaaataatgtatattcataggaagcgattcgttatttttatcatgtaaaaagatttttaataaaattaacaaatcatatgtttgaaagataagtatatagaaatctcgatagggagtattaataggaagacattaccattattttagattttttaattataatttttctctaataaataatcaatttgtggatcatttccaacttgatatgtatgttgactaaagcacttaaatccattttttgcataaaacttttcccaatccctgatgctggaatttttgtcgaagataaattcgttcaagttcaaaatgatcggaacctaaattttcactttgagcactagcttgattaactttcaaatatccagcaatttctggtccaacttgtaaaaagaaaaatttactatcagcattattaagttcttgcctcaatttttcatcagaataattagtttctaaaaatttatccatatcatttgtagctgtataggcatcgaaagtagctttaaatgtttcgcgagaaatagcttgcaaatcttttaaatcttctggttaacgggtctaatgtggtaattcatattcaaaattcattcacttccataataatgactataatattattaataatttgatgtctagcaaccactgtatatttaaaatttatattttatacttcaattcactaacccatggactcttgaaaggcctaatgtaagcttattaaatagaattggttcagttatattattactttactttttcattgataatatacgcgtggtgctagttaaatcgttttagttaataaaaaagtccaatcttgttagactcaacttgtataataatagaaaagagcctgatctgattgaactgccttaagcttaagcgttttagccaccatttacaagttagttttaaagatttagtgataatttgtcggcactggtatcgtttgtatgcaccggctgagtttactcatcggcgaaatattgatcaaattaaaactacggacagtctgattttggctttacttatctggcaagctaagacaggaattgaatcacaaagaagattctgtgaatgtttcaattgtttatcacactcacgttttaatcgacgttcacgtcagctattgcaattgatttatcagatacggcaagaaatgaataaaaaggttgacctgaatggacatttcttgatcattgacagctttccggtacctgtttgccaaccaattcgcaactatcgtgctaaaatttttcgcggttatgccaacattggttataaggccaccaagaaaatttacttctatggtttcaaagttcatgccattgttagcgatgacggttccattcttgattatgtcgtaacaaaagcatcagttcatgatgccaaggagacagttgaactgctggaaaatgcccatccatctaattactatcttcttggcgacgaaggctatttaggcaaagaactgcatcaacagctaaaacaaatgggttatgaactttggacaccatatcgtaaaaatatgacaggagctaaaaagcacaatgatcatcaattgatggctattcgcagaacaattgaaagcgacttttcgcttctgacctattacaatgccgagaacaatcgagcacgtagtctgataggctttcaaagccggttggaaattgcaattttagcttataatttggcttattgtctagaaagatttaactagcaccacgcgttgataatatgtatattattttcagtatagccaacacatatttggaaactgtcaaatcttttgtgtaaatagttctttctcgtaaattgattttttaattatttatttaatcaaagtaggattctaaggtgtcctgaacctgaccaaagcctttatgaattcgattgaaataacggtcattgtagctcattgcctgaataccaataaaagcatcaagcgactgttcagttggaaactctgccttaggcttagctttgcgcttgatcacattgttaaatgattcaatcatgttagtcgaataaattgaagctctgatctgcttgggatagttataaaagaccagcagatctggttctatgtctttcaagcttctgataacatggctgtaaaccttgccccatttggtatagaagtcatgcaggacagctgtggcttcttctttgtttgtctgttgatgcacctgtttgaattcgttcatgatcttttcacgatcgtcgacgcgtactttagcgcagatattgcgcatgacatgaaccaaacagcgttgaaaatgagctttaggataagtcctggccaaggctgttttcatgccaacaacaccatcagaaagaaagagttcaacttgcttcaagcctctggacttcatgttttgaagcatctctgtccagacttcaatgttctcactaggagcaatgcagtagtcaatgacttccttatgtccattaggtttaatgccaatggcaatatagactgcttcacgctcaacgctcaaacgtttctcggcgcaaaggaaggtatgtcgcatccaaatagacgcagaaaaacttgtcgcttagcttgcgtttgtggtaagcctcaaccttggggagcatctgcttggaaatatttgatacttgagctggactataatgactgccatacattttctcaatcaagtcagcgatttctctggtagttacgcctttggagtagagcttgataatcgtgctttccaaaacatcagagtgctgcttgtagtcaggcagcgtgtgctgatgaaattgaccgttgcgatcccgaggcacttgcacttcaattgggccaaattgcgtatcaactttgcggaaataagcaccatttctagagttgccagtattccagccatttctggcatagggatcatagcccagaaaggcagtcaattcagcttctagcaagttattaacagcctgttgtagttctttgcgcaataaatcatttattttgtctggattgaatagagcttgagcaaaatctttggtaaaatcattcatgaaggagttcttctttctgtatgtgttttttttgttcaaaccaatcatacgagaaaggaactcctttttctaatgtttaaagaaataaatttaaggaatcattcatccttacacaaactattttacagtctcaaagattagggtgaaaatgaataaactattttaatagtgttaacttgtattatattaaatatcaatattggcttatttatttagtgaataaagctcgtaacctcaaccttttaggctattctaccgcaaataacaccttgtattaaatatttagccttgtaaatttttaagagaaatttacaaaataataagaataaaatcgatcaatcaaatgtaactacaataattaataaagcctataataaactatgactatattttggaggattaaagatactaatgagtttacgaaaaaatctacgagatatttttaacagtgctaagccttcagaatcaaggcaattagcttgtgctttaacattctgcggtggctttattgatgcttatacatatatccaaaggggacacacattatctgctggacaaacaggaaacgtaatatttttcagttcagcattggctgaccataatattccaggaatgatcaatcgtgcaagtacatttatagctttttcactaggattacttcttgtaggactttttcataaatacgttaagagtcaatattggagagtattttgtttgttcccaatattagtaatttgtaccgtcgttggatttttacctaaaagcgtaccaaattactatatagttccagcaattgcttttggcttagctgttcaaaatgcatctttcagcaaaattgaaggcatgggatacaataatgtatttacaacaggtaatttgaagaaatctgtagttgcgtggagtgcatttttctttggcgcagataagagtcagcacacagcagccgttaattatatgatgataacaatttcatttgcagttggagcaaacgtttcagcgttactgcaaaagatttgggtattaaaaactatttggtttgcagttgtatttttagcagcgattaattttgtatatctgttagctttgaagacaaacaataaattgaattttaaaaatgaataagttttatggatcatctgtaatttttgcagatgattttttatatcaaatttacgagaaggatggcagagagtacagtaaaatgcttcaagacatatctgcgtataattcatattatgtaaagccagattgaaaaacaatcaatttaataatagaagtcataattaatttaattgtttcagcaaataagtcttattttggatttgttaactcgaattaagagactgtaaaatattttgtgtaaggatgaatgattccttaaatttatttctttaaacattagaaaaaggagttcctttctcgtatgattggtttgaacaaaaaaacacatacagaaagaagaactccttcatgaatgattttaccaaagattttgctcaagctctattcaatccagacaaaataaatgatttattgcgcaaagagctacaacaggctgttaataacttgttagaagctgaattgactgcctttctgggctatgatccctatgccagaaatggctggaatactggcaactctagaaatggtgcttatttccgcaaagttgatacgcaatttggcccaattgaagtgcaagtgcctcgggatcgcaacggtcaatttcatcagcacacgctgcctggctacaagcagcactcggatatcttggaaagcatgattatcaagctttactccaagggcgtgaccaccagggaaatagccgatctaattgaaaagatgtatggcagccattacagtccagcccaggtatcaaatatttccaagcagatgattccaaaggttgaggcttaccacaaacgcaagctaagcgacaagtttttctgcgtctatttggatgcgacataccttcctttgcgccgagaaacatttgagcgtgaagcagtctatattgccattggcatcaagcctaatgggcacaaggaggtcattgactactgcattgcacctagcgagaacattgaagtctggacagatatgcttcaaaacatgaaatcccgaggcttaaagcaagttgagctttttctttctgatggtgttgttggcatgaaaacagccttggccaggacttatcctaaagctcattttcaacgctgcttggttcatgtcatgcgcaatatctgcgctaaagtacgcgtcgacgatcgtgaaaagatcatgaacgaattcaaacaggtgcatcaacagacaaacaaagaagaagccacagctgtcctgcatgacttctataccaaatggggcaaggtttacagccatgttatcagaagcttgaaagacatagaaccagatctgctggtcttttataactatcccaagcagatcagagcttcaatttattcgactaacatgattgaatcatttaacaatgtgatcaagcgcaaagctaagcctaaggcagagtttccaactgaacagtcgcttgatgcttttattggcattcaggcaatgagctacaatgaccgttatttcaatcgaattcataaaggctttggtcaggttcaggacaccttagaatcctactttgattaaataaataattaaaaaatcaatttacgagaaagaactatttacacaaaagatttgacagtttcttaattgaataatatgctgacaataatcaataaaacaaccttcaaagagaagtattttgaaacaattatggtaaagtaattctaattaaaaacaatgaaaatagttgagtaatatttgctagttttgcctttagtatctataaagccattttttatttttatgctatagctttctttaaaacaaaaattttaatgatcgctagataaacctatctcgcaaaagcctaattttggtaaatttgtgcttttgttatttttattgttttaacgttttgtatttcattttaaattcgtaaaaaaatattttataaattctttgctctttttgctacatacaaatcggtattaagtgcttttatatttattcttattccctatttttaagatttgctgcaataatacacatattgaaatttcttaaataaataatcaagcggtaaaaatgataattctactaaactcatgactcaagtcgctacttaaatctgtgtttttacatgaataagacatctaaataaagtttcaatcttcaaaaaatgctgagaatcactctaagatttctttttaatgaattaatttatcgtggttactcaatctttatacaaacaagcaacattttaattcattattatacctctatctcccctcctctgctgaccagggaagacgaaaaaagagccgaaatcagacataattcgtccaatcaggctctttgcttatctagctagaataaaaatctgaataaactcaatctgttgcaggtctaattttattcataatgaaggcaacgacgattaccaagataactgcacctaaaattgacggtacaattgccatgtccgcaaccttcggtccccattcccctaaaagggcttggcctagtgaagatccaaccaatcctgctaaaatattagcaatccagttcattgacttaccatgtccagttaaagcacctgcaattaagccgattactccaccaacaattaatacccaaatccaatgtagcattttgatcacatttgctttcttgcaaaatatcttatcacatttctgattaaacaaagcgctttctttaactatctttattttagagactgtaaaatagtttgtgtaaggatgaatgattccttaaatttatttctttaaacattagaaaaaggagttcctttctcgtatgattggtttgaacaaaaaaacacatacagaaagaagaactccttcatgaatgattttaccaaagattttgctcaagctctattcaatccagacaaaataaatgatttattgcgcaaagagctacaacaggctgttaataacttgttagaagctgaattgactgcctttctgggctatgatccctatgccagaaatggctggaatactggcaactctagaaatggtgcttatttccgcaaagttgatacgcaatttggcccaattgaagtgcaagtgcctcgggatcgcaacggtcaatttcatcagcacacgctgcctggctacaagcagcactcggatatcttggaaagcatgattatcaagctttactccaagggcgtgaccaccagggaaatagccgatctaattgaaaagatgtatggcagccattacagtccagctcaggtatcaaatatttccaagcagatgattccaaaggttgaggcttaccacaaacgcaagctaagcgacaagtttttctgcgtctatttggatgcgacataccttcctttgcgccgagaaacatttgagcgtgaagcagtctatattgccattggcatcaagcctaatgggcacaaggaggtcattgactactgcattgcgcctagcgagaacattgaagtctggacagatatgcttcaaaacatgaaatcccgaggcttaaagcaagttgagctttttctttctgatggtgttgttggcatgaaaacagccttggccaggacttatcctaaagctcattttcaacgctgtttggttcatgtcatgcgcaatatctgcgctaaagtacgcgtcgacgatcgtgaaaagatcatgaacgaattcaaacaggtgcatcaacagacaaacaaagaagaagccacagctgtcctgcatgacttctataccaaatggggcaaggtttacagccatgttatcagaagcttgaaagacatagaaccagatctgctggtcttttataactatcccaagcagatcagagcttcaatttattcgactaacatgattgaatcatttaacaatgtgatcaagcgcaaagctaagcctaaggcagagtttccaactgaacagtcgcttgatgcttttattggcattcaggcaatgagctacaatgaccgttatttcaatcgaattcataaaggctttggtcaggttcaggacaccttagaatcctactttgattaaataaataattaaaaaatcaatttacgagaaagatctatttacacaaaagatttgacagtttcatattttaagcgaatgaactatttcttgtcacttttaaaatatattatttgactgtcttatacttttctttagatttggggcatatttcttgccacgactaattctttattttttgtctattgtatatctcaatttgatttcaatttttttcggtttgattactgatatattaataaatgatctcatctattgccttttgagaactatatctgtagtctataaagtataaattatgtgagagatatagataagattctctccactaagtatggaggacataaattgtttaaaaggaaatcaattattaaattagcatgtgcaactatgttaacgaatgcaggtgtcacacttttatctcaaatgactcgtttctctgactcagagagcattgtgcaagcttcatcaacatcagttgttgctaaagcccttggaattgatgttgccagctaccaaagcgcagatttaactgctcatgccaaggctggttctcaatttgcaatcgttaaagttagtgagggaaccagttatcgcaaccctaaggcagccaatcagattaaatctgctattgctaatgatatgatgccgatggcttatcattttgcaacttttagttcaagttcatcggccgctaagcgcgaagcgcaatacgcaatttcttctgctaaggcgttgggattaccagctggctcatacttagcctgcgattatgaaactggtcagggcaatatcattactaatggtaaaaatgtgacagctaaggctattattgcctttatggatcaaattaaggcggctggctatcaaccacttctctatgctagttcttccgttttgcaaaacaatattaatactccatctatcgtgaacaagtatcctaattcactctgggtagccgcatatgcgatttcaggccgagtagaccaacccaactttaaatacttcccttcaatggatggtgtcgcaatctggcagttcacagataattggcgcggaatgaatactgatggcaatattacagtcttgccattatcaatcgcaggtaacgcggcagtttcacaggctcctaaggcttccaataccaagaaaacagctacagttatgtacaagtcatatgtttatgacaaaaatagcaaccggacaaatgatttttataatgcttacagctctattgcttattatgacaataaggtgagaattaaaggcaaatcaatgattcgtgtcggtgaagacaagtatgtgatggcaagtaacgtactaggcaattcacgcgtctttaaagctgatgctaaagtgtataaaaatgatggcaccattaatacaaaatggtctactaaaaaatccggttcaccgatcaagacttatggccctaaacattacatcaataatgaagcttactatcgaattggtaaaaatgcttacgtcaaagcagacaagttctaatttatttttagcagcaaatatttgctgcttttttgatgcatccctaaaacgtaaatgaactgacaaatcatttccaatttatttatctgcatcccttttttatccatgttaaaattaaggcattatatagaaacgaggataagataaggatgaaatttaaaaagaagttagctttattcttaggtctgggagtattattgctttctctgactggttgtagtgattttcaaaactgggaattatctatgcgctctaagattggggcattgcccttaacagtatcaacgtatgattctaatggacaaaagatcgaccagatcaaagctaagtcagttaatattcatactgataaaaagatgtcacagaaaagtagtaatggcactgaacattctagcgtaattgatgttgactatggcaataatcgaatgattcacgttggttctactatgattgcctatgaaggactgaaaaactacgaggatgcatttaacaaaaaagttaagatcgacgatcaaaatcgttctgttcctctgttaaatacaatgtatcagaattttaaaaacgattggaatggtagctcaagagtagtaatgattagaagccaattaggaatgccgattgctgtctttattggaaatcacgtctcaattcataagagtgatatgaagaatgcaactcaatttgtgattgatggtcatcgtctatttgtttaccgtgctgattacacagtttatccaatgtccagtttaaaaagcaattaactataaaaagtgtcaatcctcattttaaggactgacactttttattatttatcatcaattaatgcattaaatgcttcattagtttcaacgatgtcgctcattacttgattaatccagtcattaagcttatcgttatcgtagttttctaaaccgccttcggaatctccaatgtccgcaataccattattgaaatctactagttcagtaattaacttttgagcaaaaatcttagtggtaccaccaaagtttttcgcaaaattatttacatccccatatgcatcggcaatatcactgaaaactgtgacagttttaccaaaagtctcactcaagttatctacatctgcttgagttggtacagtcaattcttcatcttcattattaagttgttcatctaaacgaacgccaatgtcgtttaacactaagtgaccatcatatagacgattcagtaatttgataccactagggtttttagcttggaagtttacactaatttcttctgtcatactttttcctcatctcacataatgtattttcatctattgtacaatttttagccaaaaaatacgactaaacaaggaaaataagcttttttcgattctttataaaaaatgttatattttacttgaacattagcaataaagagcataaaataaacgattgaaaagtgttgtaccatacaaacaacatatgtttgtaagtaatgtttgaattactaaatgtaatttgcccttacttactgacgagcaatcactgttgctataattagaatgctaagagttttctataagcgttgctggtattctagttatagtgacatgattatctaagttaaatttagttgcaatcatttttctacgttagtactatagatattcacgttcgaatgagcgcagtaattttaaattagactgttttttatcacctattcctgagaataggtgatttttttatgattaacgtatttgtatgatataatataaacattagttcgcaaaaggagtagatatggaaactgctaaatacctagaattgatccaaattgaagtaaataaattgcctgattttgttaagcaatttaatcttggtactaatcattcattaactactacttaccagtacttaactgaaattcgacgcttcttcgattggctacgtcaagaaaatatctcttctgcttcagataatgctcatgttactacggatacattagccaacttacgtcgcaatgacataatgctgtatattgattatttaggacatacccgtaataagcaaggccgactaaactcccccactacgattaatcgctcaattaatgctttacgctccctatttaagtttttaaccattactgccgacaataatcatggtgagccatattttgaacggaatgtaatgcttaaaattaattctttaaatgatacgcaaacacttaattatcgggctcatgtacttgaaagccacatgtacactggtaagttaaaatttgaatttttgacttttattgatcaggactatattaaccattgtaataagcaagcaaagattggttttaagcaaaacaaagaacgtgacatggcaattgctgcattaatcttaggtaccggcattcgggtgtctgaatgtgctggcgttgatttgagtgatttaaaccttaaggatgctgtactagatgtaactagaaaaggcggacaaaaagatagtgtaccaattgcagaatggacacttccttatatcaagcgatataaaggtattcgtaatgaacgctatcatgcagatagtaagcaagtggcattctttttaactcaatggcatggtcaaacgcggcgaattacaactaatgcaattgaaaaaatgatcaataagtattctgcagcttttggtcatccccttaccccacataagttacgtcatacggttgcttctgagctctatgaagtaactaaagatcaagtgcttgtagcacaacagctaggtcaaaaaggcacttcagccaccgatctatatactcatgttgatcagaaaaaacagcgtgcggctctcaatgagatctcaaaaaaaaatcacgattaatcaaattaaatgcaaaaacgagtttggctattcaattccaaactcgttttttattaatgtttcaatttcttgtaagcttttttggagccacgatctagatcacgattaaacttataatcttgccagtctttaacaaagagtaaatctaagttatatccttttgggtacaagtctttagctagtcgtcttaattgtaaacgtctgagtggtacttctacaaattcttttgtcacaaatatctttgctgcattttgggtaggaagatatttataaaagattccttcttcttttaaattggtagcatatacaatatcacctttatgaaattcttttttaacaaccaggttgcttttgtttttccgctggtgaacgaaacgtttttttaaagataaaggtaaattattgcccgctaatatggcttctgcttgatgcaaaacattttctggaatacctgattttttggcgatccatagtgctcgactattaccaatacttcctatctttaacttataagtaggttgcagattttttaagtcaaaatccattgcagctgtgataaaaccatcatgctgcttagcaaaatccttaatagagctgtagtgtgttgtggccatgattaaacagccacgtaaatacaactcttgtagaataccaatagcgagtgcgcttccttcatttggatctgtccctgtccctaattcatctaataatactaaactatggaattgagcatatttggtaatcatggcaatatctttcatttcggctgaaaaagtactcagagaattatctaggtcctggtgatcacctattaaagtaaaaacgtcatccattaatggaatatcacatggtttatcgcttggtaaaaacagacctagttcggtcattaaaatcatcaagccagtagttttaagcgcgacggttttaccaccagcatttggtcctgtaatcattagaacactattttcttgggttaattctaaggttaacggaacaggattaatgatcaagggatgccgcactgcacgtaaaacaagagaattttcacgattaattttaggcctaatacaattatatttttgtgcaaactttcccctagcaaaaatcatatctagtaaagtgattagttcaatgttacgcttaatatcatccttcacgtcgtatatttttgcagttaaagcacctaagattgctagttctagattacgtatttgtgcctttaaattggttatttgctgatttagacgaacaaccttagcaggttgaaagtagacggtttgtccaccattagaaacagccacaatagtccctgacaattgatttttgtagtttgctttaattggaatggtagcgtagccctctttttcaacgatcattgcgtctctaatcattttttgattaggtttactagtcaaaaaatgatttaatgcagttttgagttcagtaacagatttctttaagtcgcggcacatttttgctagttcacgatctgcctcatcgcgtacttgaccatgttcaatagtagtataaatagcatcttcaatgtctggcaatagcgtcatgtcttggacatatgcattgagtaatggtgctagctgctcatgtctggctaaaaagcgttgtagtaggcgatttactcgtaaaaattctgctactttttctagatcatcaggagttaagattagtcctttttcagctttagtaattaaatgctcgatatcctcagaactggcaaaaggaatgtgctgccgtaatttcaaaatcttcacggcttcttctgtttcattaagcagttgttctactttatgtaaattgctacttggttggacggaacttaattgttctttggcagcaatagtaattgcctgttgagctaagatatctttaacttgagtaaagtttaagttttgattattgttgatatttttcaatttgatgtaatttccttatgtttaatttaacgctgattgtaactaatggcttaataagtatgcttgcagacatatgcatttcctcgaatttctataatttgatttaaaaatgattgtaacataaaaagaacattaaaatatatactatagcaaaacagttattaaattaattcctatattttatgataaccatattactattgcctactatagcaattttgaaactgtcaaatcttttgtgtaaatagttctttctcgtaaattgattttttaattatttatttaatcaaagtaggattctaaggtgtcctgaacctgaccaaagcctttatgaattcgattgaaataacggtcattgtagctcattgcctgaatgccaataaaagcatcaagcgactgttcagttggaaactctgccttaggcttagctttgcgcttgatcacattgttaaatgattcaatcatgttagtcgaataaattgaagctctgatctgcttgggatagttataaaagaccagcagatctggttctatgtctttcaagcttctgataacatggctgtaaaccttgccccatttggtatagaagtcatgcaggacagctgtggcttcttctttgtttgtctgttgatgcacctgtttgaattcgttcatgatcttttcacgatcgtcgacgcgtactttagcgcagatattgcgcatgacatgaaccaaacagcgttgaaaatgagctttaggataagtcctggccaaggctgttttcatgccaacaacaccatcagaaagaaaaagctcaacttgctttaagcctcgggatttcatgttttgaagcatatctgtccagacttcaatgttctcgctaggcgcaatgcagtagtcaatgacctccttgtgcccattaggcttgatgccaatggcaatatagactgcttcacgctcaaatgtttctcggcgcaaaggaaggtatgtcgcatccaaatagacgcagaaaaacttgtcgcttagcttgcgtttgtggtaagcctcaacctttggaatcatctgcttggaaatatttgatacctgagctggactgtaatggctgccatacatcttttcaattagatcggctatttccctggtggtcacgcccttggagtaaagcttgataatcatgctttccaagatatccgagtgctgcttgtagccaggcagcgtgtgctgatgaaattgaccgttgcgatcccgaggcacttgcacttcaattgggccaaattgcgtatcaactttgcggaaataagcaccatttctagagttgccagtattccagccatttctggcatagggatcatagcccagaaaggcagtcaattcagcttctaacaagttattaacagcctgttgtagctctttgcgcaataaatcatttattttgtctggattgaatagagcttgagcaaaatctttggtaaaatcattcatgaaggagttcttctttctgtatgtgttttttttgttcaaaccaatcatacgagaaaggaactcctttttctaatgtttaaagaaataaatttaaggaatcattcatccttacacaaactattttacagtctccaattttactataacattcagcactagtatctcaactgtaatttttaattacaaatctattatcgtaaaaagggtaaacaaaaaagaccatagtttgtactatggtctatggctatttgttcttattttaattcgagcttatcaatatcaaccatccatgcaattgcaattgatttctctcctaagtgtgtagcgattactggactaaattcagctacatcaactggcttatctggaaagttttcattaacaaattgcttaatttgctccgcttgctttaaatcatttgagtgaaatacaaacaagcgtagcttatctttataaggcaaatttgctgtcttctctaaagttaatttttctaccttagaaacagcacgctttaatgatctgatcttatcaaaagcaacgatttttccttcatcattaaaagttaacaaaggcttgatttgaagcattgtcccaataaaagcaccggcattgcttaaacgaccaccacgacttaagtttttaagatcatctactacaaagaattcatcaattgtcttacgtatctcatctaacttctttaagatagcctctggttccataccattttttatcattcttgcggcagctaacaccaagtagccttgcaatctaactgtcatcttagaatcgtatggatataaattatattcaggattgttatgtgccatatttaccatattttgataaaagcctgagataccactggacaaagtgatagcgataatagcttcatagccttctccgtgtaatttattacataattctatcatttgccccatgctgggctgtgaagttttaggaaaagcagcaccttgtctctccatctcaaaaagctgggtggaagtgatattaacgccttctgaatattccttatcacctacgatgacaggaataggaactacattaatatcattatttttaacttcttgatcagttaagacactagtactgtcagtaactaatgcaattttcaatttattaacccttcccatatctaatttagcatagaaaaattatagcataaaaggcacctatcacgcaccctattccattttttctagggtcatagaagtatcagcgacttgatttaattgcttaataaataaattagcagcatctctgtcaaaatagacaaataataaattctcaatcttagtcagagttttttttagttctttagctttagtcacgccagcttcacttagattcacaatcttgcttgaatctttttccgatctagtgatattaataaagctcatagtcttcttttgctgcaattgacgacttaaggttgataatgaaatattaagcgcttctgccagcttccccatcgctaatgcttgatttttgttttcatcaaaaaatagcaaaattcgagtttgtgaaatatttaagccgcatttgtgatttatttcttttttcacttgatctgcgatcgtactaaaaaataatacatccattcgtatagtcctttttctccaatgtagattactatatacttgtattttatcatttaatatggcatttgataataccaaaaggctaatttatcagtaatattgtataatacaatgcactttttatgttgtaatatacaacttgatgatatagcagacctcgcgtgaaacatttactactgtattgcaggtttcaattatgattagctataacttataaatataatcattttagaatctgactaaaaattgatataatattacacgaactttgaggtgatatttatggcatttgatggattatttatccatagtttattaaaagacttagtccctactctggtaggtggtcgcttatcaaaaatttatcaaccatttgatcaagatctagtcttaatttttagaaaagatagaaagaattatcaatttttaatttcggccaatgcacaatatccaagaatgtatttgactaaacaaaacattgcaaatcctgataaagcacctatttttgtcatggttttaagaaaatacttagaaggttcagttttgcaatcgattgagcaagttggcttaggtcgaattgtcaactttcattttagtaatcgaaatgaacttggtgatcaagtcaagctcatgctttctgtagaattaatgggacgtcatagtaatgtcatcctttataatcaagaagacaatcacattattgatttacttaagcgaattaatcctgatgaaaatagagcgcgtgttttactgccaaaagcaaaatatgagttgcccccactaaaaccaggattaaatgggttgactctatcagaaagtgaatttaaacaattaagtagtgaaaaccagcctaatgaaattgctcaaaaaatggatggcttagataaagatgatcgaactgaattattaggctatcttgaagacgattacacttattcatcttttaagaccttttttaatcagtttgacaatccgcgtgcttttattttaaaaacacctagaaataagcgtaagattttttgttatttgccctatcatttagatttagagaaagaaagctctaatccagatctgaatgctggcttagatgaattttatgaatatcaggcaacacgtgattgggttaagcagcgtgcaggacaagttgaacgtgtagttaagaatgagcaaaataaactaactaagaaagttaaaaaacttgagaagcaattagatcttgctgaaaattcagagggctatagaattaaaggcgaaattttaaatgcaaatttggctcaagtaaaacctggaatgactaaagtttcattacctaactattacgaaaataatgctccattagagattaaattagatcctgctctctcccctgctcgtaatgcgcaaaagtattttactcgttacaaaaagttacgtgattctattaagcacattaatgaacagcttcgtattgctaaggatgatattcgttacttggattcaattcaaacagctattgacaatgcggatccacaggatattgatcaaattacagatgaattgattaatcaaggatatttacgtaaacaaaagaaaaataagcgtaggaagaaaatcattgaacgcaatttaaatgaatttaaactttcatctggtaaacacgtattggttggtaaaaacaactatcaaaacgattggcttactcttaaaaaagctaataaatctgattactggtttcatgttaagaatatgccaggctcacatgtgatcttacgcgatgatcagcctactgatcaagatattaaagaagcggctgagattgcagcttacttttctaaggctaaaaattccgctcacgtacaagttgattatgtgcaagacaagcgtgtgaaaaagcctaatggtgctaaaccaggatttgtaatctacactggacaaaattcaattgaagtaactcctgaagaaaaggaaattatgaataaaaaaattgaaaaataaaaatcatcgaactagttagttcaatgattctcataaatgcaaagtcatatcgactttgcattttgttttgcttattaaataggttgagtagttaaagccaatgattctagaacgtctaaaatcaattccgctgtttcgatacttgagaaaacaggaatatgtgtattcagcgcttcatctctgatgcgcgatgcatcttcgctagctgcatcagacaaattagtaatattaacaaccatgacgatcttatgttgacgaattttatctagtagatttctagggtctttatgaaccttctccactactccagtagtaatcccagcttccgcaaacatattagctgttccttcggtcgcaattaatttgaaacccaagcgatcaaatcggcgagctagttgggtcacgcgattcttgtcttcatctctgactgaaataaagattgttccataacttggaatatgtaaatcacttgcttcatatcctttgtataaagccttagctagttgagtatctcgacccattacagaacctgaggatttcatatttgaatcgaaagtattaccacttgaataattaagaaatgaaaatactggcattttaatatgaataaaatcgctgttttgccatagaccattaggatatcctagctctgctaaatttttgccaattaaagcttctgtagcacaagtagtgatatccttatctagtgattttgataaaaatgctacattatgacctgcatatggtttaatttgcaatagatataggtcattatcaacgaataaatagtgcagattaaaaataccttttgttttcagctgcttaattaatttaattgactcttgctcaatctttttttgctgctcttcggttaaattttgcggctgaatcactgcaattgaatcagaggcatgcgaacctgtttgctctagatgttcaattataccgggcaaagttacattggtaccatcagagatagccgttacctcatatttgtgtccctcaataaagcgagaaatagttatttgatcaagatgattttctgctaaatatttctctattgcaggaacatcataaacaactgcagatttttgcttgttttctttattcataccaccaattaaaagtggaaaaccatatttagaagcaaaagcgaaaacctggtctgtatcagttgttttatttaatgccgggacccgctttaaggtagtagattgttgatcaagcaaagtagtaatcttatcccgcggatcgtcgtttgccttttgcccaataacgtgcaaaccacatttttccaactctttactcaatgcactgattcttttgccagaaaattgaactaatacatcagaaatattttctcttttagcaacagttagaatattttcaactgtaatggaatcaaaataaactcggtcaatattcttataccttgatgaaatcgattcgtcattatttgatagaagcacagtaacatagccatacttatgtaaagtatcggccgcgtgagcaatcatatagtcaaactcgctagtaaccgaaacttgaagcggcaacatgcccaaaatcaagatctttttttcagcatttaaagcttgtgcttcattttgaacatcatatgcactgtagtaagcacaaacattaggtttatatatacctgctgagccgtcgatcttcaaatatgatggctgcaagtcaattttattaatcaaagagcgaacttcagtaactgatttttgtaaaatcttagctaataatgggttaaagaatccatagactttagcttcttgcagcaaatcacgcgaaggctgctccttctcttgtaataactttttgccaagtcttacaatgtgaagcaatttctgataataaaccggatgcaaatgtgttactttttgtaattcagaatatggaatatcttgatcaattgcggctaataatttaactaaatgcaattcatcaggatgtgccaaatcattcaaaatatctgcagtggatttttctttttcttttataaaagcatgccaacccaattctaaattaatagttgcatctaagcctttcagaaaagcagtttcaaaattacggcctacacccattgcttctccacttgcttgcatgcgacttcctagcaaatagtggttatagccggattcagcaaatgaccaatatggcattttaattgctactgcatctaaggtgggttcaattgaggcattaagtccagatagaggatcggtaatctcattcagtcgataaccgatagcaactttgctaacgacatatcccacatcatacattccaattctttgagcccaaacagaacttcgcgtcaaacgcggacgaatcgtcaaaagcttagatcgaatttgagttccatggtgtttaatcgcaaaatgaaaactagcaaatccaatgagatcaagattagacatgatttttctaacggttattcttaactcttgaatatgatcattgtttagggttaatgatggcatcacaactgcagagtcacctgaattaatacctacagcttcaatagatcccgcaaaattgataaaagctaaattgccatccttatcacggattacgtcaacaattacttcttcccaactagataagtcttcagttaagcgataattcttccatgtaaaattatcattttgcttttcttctttaaagtaactgattaaatcggtaggatttgcaaattgcaaatgttcgttgtgtacaaaacggttgtacttagtaactaatacgggaaaagtgactttgtcgttaatgctttctagcgcattatctaaattatcctgaatactctgattaagttcccaagattgcccggtatcaatatgtagcttagtaagcaactctgtctttttctgttgattccccatttgtagagcacgcgaattcaatgttagtaactgaattcccatttgttctaaaacgccatcttgtaataacttatgtgcaacctttaaaccattagttgaaccataagctgtcataattgcatctggctcttccatccgtagaattcttttcaggaagtcgagagtcatcggttcaagatagactgttacaccaagttttttatcagttgaaattgtagctggattaggattgactagcacaacttgaatgccttcttctgtcaaagcatcaattgcttctgttgccataagatccatttctgctacactaccgattaaagtagggcctgatccgataattaaaactttatctaaatcgttttctaatggcatataactaccccatcatctgtaaaaaataatcaaaaatttcatctgcatcattagtgcctggtgctccttcaggattaaaagcagtggcgatcaatttgtccttactgttccagaagcccgccatcagttcactgtgtagatcaaagtattcacgattcatattcatcttcacactatcaggcaacactagttggtcaatattcatcgctgtttgccagatagcattactattttgttcaatcactggataattaataccatcaaattcttgtggtaattgaaccagttcaaagccgagataatcgctcaaagttaaaaaacctaatccgattcctaaaattggatacttaccataaaaatgatctaaaactggcgttagctgattaattacttcttctggttttcctggcccatttgaaataatcattccttcaggacgtaagttttcaatatcaatcggactggcactgtatggtaaaactgtcgtatttacttttcgtaaagataaagcacgcagcattgagtgctttagcccaagatctagcacagctacagttcgtccaacattaggggatgcatatgcattcttagttgaaacagtcgcagatttatttttaggtaaaactagtgctttaatctgatcaaaggcatgctcgtcattagtatccatgatcgaagccttaattgtaccttcttccattaagcgatgaactaaagcacgagtgtcaactttgaaaattgcagggatgttcttttctttcaaaaaagaacttaaatcttcaaaattttcactatctgaaatatttaatgcaatatcgttagcaataatccctttaactacgggatcaatactttcataatcaatggcattaataccgttattaccaatcattggtgaagtaaagactaaaattttaccagcattagtaggatctgttaatgcttcttggtagccaaaattagccgtttgaattgctaattcaccggttgaaataatactggcaccaattccttcacctggaaatgaactgccatcttctaaaatcaaataccgtttcatattatcacttacttgtttgttctagttgagccaacgtttcttgaaaaatttgtggtggttctacactaaactctagccattcgccagtacttggatgtttaaatcctaatactttagcatgcaaaaattgaccatgacctttcaaggttttacgtggaccgtataatgggtctcctgcaaccggatgtccaatatagtcaagatgaactctaatttgatgggttcttccagtttcaagctgacactcaattaagctataatccttgaactgctcaagcaccttgaagtgagtaatagcttttttgcctgtttcaactaccgccattttcttgcggtcatatggattgcgaccaattggtgcatcaattaccccattttcttccgcaaaattaccatgaacaattgcccaataaagacgtttgttagtcttatgagccaattgatcttctaatgattcacgagccttggcggtcttagcgatcattaataaaccagatgtatctttatcaatccggtggacaattccaggacgaaatccttctggtgattgtgctaaggccttggtgtgatataacaacgcatttactaaagtatgatctggatgacctggtgcgggatgcactaccataccttgaggcttgttaactacaatgacatcatcgtcttcatacacgatatcaagtggaatattttcgggtataacatctaacggtttaaccgctggaatattaacttcgattttatctcccgcctgaatcttataagatactttttcgactttgccattaactaggatattttggtctttaaccagttctttaactctagttcgagatagatcaggaatttgttctgcaacaaacttatctaaacgtcccttttcgttttttacttcaagtgaatattctttagtcatgttgttcttccttaccttcaataaaaattaagtaaatgaacacaaggattactccaacagtaattgcggaatccgcaatattaaaaatgttgaagtgaacaaaatcaagctgaagcatatcaactacatattttaaatgcaaacgatcaataaaattaccaacaattccacctaagatgagggctaaacccacatcaaacaaggtattcttgtactttttgttaaaaagaaaatacaagcaaacactaatggcaataatactgataatgtaaaaaagccacatttgaccagttaaaatgttccaggccgcaccattattttgcaaataattaaaggaaagaagcccaggaataatctggtgtacttctcccacagcataatgggcaacaatataattcttaagtccttgatcggcaagaaccacaactaatgaaataattaaatataaaaactgcatatctttttagaataatccgctaattttaccattgttatcaacatcgatatctagggccgcaggatgcttaggcaaacctggcatatctagcacatgacctgtggtaaccacgataaaatgcgcaccattttttaaactaatccctttcacatgaagcttaaagtcagttggagcacccaattcgttcttgttgtcgctaaatgaatattgggtcttggcaataattactggtaattgggccttacctaactttcttaattccgcaatttgcttttcagccttgtcactatattcaactccagctgcatgataaatcttggtagcgactttctcaatcttgtctttaacatcgtcatcatctgcataagttggagttaaatctgccttgccagagttagccaaatcaacaacagcttgagcggcttctacaccacccttagaaccttcgccatgataagtaactacttcagcattaataccttgttcttcaattaattgtttaagcaaagcaagttcttggtcagtatctgaagcaaaacgattgattaacacgatgaccggcacattgtatgaacgcatgttgttcatatgacgctcgaggtttttaaaaccttcttttaaagcatctaggttttcttcatctaagtgatcagttgagcctaaagcttgatacttcaatgcacgaacagttgctacaactactgcagcatcgggcgtcttgtccagatgtcttgagacaaagtccatgaacttttgcccaccaagatcactaccaaagccggcctcagttaatacatagtcgcttaaatgcaaagccaagtttgtcgcaatgacggaattggctccatgcgcgatattagcaaaaggccccccgtgcactaatgctggtgtgtgttccaaggtctgtactaagttaggcttcagcgcattagacaatagtgcagcaattgcaccttggaatcctaactgtttaacataaaccggttcatcatccttagtgtaaccaactagcatgtcaccgattctactctttaaatcgttaatatcagttgccaagcagagaatcgccatcaattcgttggctacagtaatggcaaaactagcttgatgttcaacaccattaaacttggagccttgaccaaccgtgatttttcttaaagcacggtcattaacatcaagcccacgcttaagtaaaattcggtcaggatcaagatttaggctattgtcttggtagatgtagttatcaactaaagctgcaagtgtgtcaattgcggcagttaaagcatgcatatctcctgtgaagtgtaggttgatatcttccatagggatgatttgtgctttcccaccacctgtagcaccgccttttaatccaaaaacaggtcccatcgaaggttcacgcaaggcgatcatcgtattctggtgcaactgattgtgaattgcatcccccaagccaattgtaatcgttgacttaccttccccagcgggagtaggagaaattgacgttactaatactaatttacctaactttttactagcacgagtcctgttaatggcttgccaagtaatcttagccttatcatgaccataaggttctaagtcttcctctttcaagcctaccttagcggctatttcattaataggtaattctttggtttcttgtgcgatttcaatatctgatttcattattgcttattcttctttctagacatcattaaaacagaatagctttggtaatcactttttagttgataaacttgaaaattacgccaacttgaaagcaaagtcatttgattgatttttacttttgaacgatatggcaacttgagtaatattttgtctccacccttttgcaagtaagaaaaggaccaagtataaactgctaaaagtaagaaaatgataccaactactattccaggtatactaattgctttgttcccttcatagcccaaaataaaggcgataaatagaacgattaagagccaagaataatagataattcctgcaactcctagaaacatgaaatgccgtttagattttagaatttagatcacaccctatttatttaatcatgtctattgtatcaaagatttaatcaaaataagagggttgaacttacagcaattaaatataagtccaatcctctatcacatttatttactttactactgctatttcgtctctaacctttatattgcttgaatcgatgccaggtttttgaccgtgaagattaaagtctaaatcaactgtcggttgaaacagtaaatgtactcattgaaagctcagtagccttggtatttttcgctgcttgaccccatgctctcaatactgcttcgggaattcctttagcattagtcaaatttacgttacttaatttattaccaacatggccgaaggaatcaccattatcaccaatattattaccaaagtttacattgcttaggtcaatattggataaattactatcgccatcgaacaaactagcaatcgatttagcattagataaattccaaccactaatatttacagattcaagacttttatcatgaccaaatgttgcataaatattagtaacacgacttgtatcccaaccacttaagttaatactttttacatttggaatactagaaaataaaagtttcagattagttacattggaattcaaagttgtagtagttaaatcaatggcagttgcatttggttctttattgcttgaacgtatccattaactatttctctagtaatgttgcgggcatttgttagatcaacatcagttaaggcattattatgtgcaaaaaagttccaagcgtttaccacatttttgtatacagtatcgcttagatcaactttcacaagcttttcagcgccactaaacatttgtgatacgtcactgaattgacccatattccagccagcgatgtttacattttcaagattcttgtcattttgaaacatagatctaattgcagtggcttcactaacatctaaatgacttagatcagcagactttaaagtgtcactgttcattaaggctgcggtcatgtcacccttagcataaactttgttcttatctccctcactgtcaatagtaatgttaactgcacctgcatctttgatagtttctaataagtctttagtgatatagactttatcatcagtagttattgttcctgcattgataaaatcttgggtattagggatgtaaatatttttattaccagtacccttatatttagttaaagtgtattgatgagaattttgatctaaacttccatcccaatctgcagtgttgtactgactattttgagtggtgttagcttgtgtcttactagttgaagctactgtagtagcttgcttattggtagaagtcgtactctcctgcttgttttcattagtagctatcttgttcttactttcaattgatgatccgacatttgagttatcatcgattgaattgttcttagtagttaaatcagtatttgaaagatcaactttgttagtcgattttgtcttcacaatactagtagtgtcttcagttttattggcaccatttgtatctacattattagaagttttagttgtggaagcaacttgctctgtagtagtttggtcctttataacactggtagtagcactatcagatgaatttgcatcaacactatcagcatgtactgtttgactagagtaactcataaaagtcaatccaattagtacagaaactgcaccgattgttattttacgaattgaaaaacgttgtttaatagaatcaatattattgtttctaaggaaatatcattaataaaaaatgaccgagaaattaatctcagtcatcttcttatcaataagggtatctcatttctactaccctactcgactagtaccattagcataattcaaagttacgccatcttgcacgttgaaaatgtaaatattgaaatgaactgcatttgagttaaccgactgcccttccatttcaactccgcgagccaatagttcattgccacgaaagaccggtgtcacacggtagcggacgtagttgcttcgactttcttttacataatcagcaacctgatcctcatagcgcaacatatcaggatcatttagctgccttgtacctgtcatcaaatttttaatgttgttgttctgtcctgttagctgataaccaatcaaatggcagcgattatagagccagccgccagcaactcgtttattatgccaaccagtaggatcaacatgtagtggttcgcgtctagcgcttggcatcagcgactgaataagcaatgcgtttgcggcagttacccgattcaaaccatcgaggttaccatattcttgccatgctccgcgattagtactcaagtcactcttagaaaaactaggatcgttgttatttactgtaatgatgtttttcccagaatagttaagacttgccagttttgcggcactaacagattcaatattgtgtttgccagtgtacttcttgagttctttgcgcagtttagcaatctttttgtctaggctaacaattttcttttcagtttgcttgttttcctgcgcaatttgcttggtctttttctcagcactgtggtcatatttgatgatagttttaaccttggcgatgacattttgacttagactaggattagtaatcgcaccatagccgccaaacaaaaacaacgtacttgaaacaagtgtaataattttcttcttattcatcacctttttgcctttctgtaaccagcattgattgcatcctgctcactattgaagtaaaccgcatttgcggaattcatatgatagcctgcttgtcctggtacgtgataaatcttagaattgacgttaccgacaattttgccagtttctgctgtatctaggtctccatgattgccgccaccattagaatgatgtgttgcagttgaacgactagattgagctgactcgttttgccgtgattgttttgctatttgagtagcttttttagcagctgcttttgcctgttctttttgctccttctcttgttcttcttttttatccttagcatctttaagttcggagcttagcttatcgtactcatccttcttcttcttttcttcggctaattcaaaagtctgctcttctaagacttcttcatcagtagtgcttttctcttgaaacttcttctggtgctcaatatatgctggttgagaatgtactaattcacgagtgatgtttagaccatatttatttaatagcagtttttcagtatcactaattttataaatacttcttcttggtgagattagtaaaccagctaattttaaatcactaagcgcccaagctactcgactaattgctactaaatcatgatatttagaaggatatcttaaattaacaagttcttcaggtaaattaatctctgtgacaacagcttatcaagctctctacctacccattcttctttagtactcgctacctctagcatgggacctaaaaatgcatcccaagttggcatcccattttcactatgttttaaagttttgtagtcaatcattttttatctttatcaacttaggcgtattactgtaatgtgttcgcccagaagcttttatattaagattgactggttgcatcaaatttacgctagtcaatattgcctctcctgactttaaactcgacaactgagctaatttgtctttatttaggaaattattgattgctttaatttcatattcaccagttaaccgatgcattaaaagtgttcctatctgatttaatactatagttggcacatctttggggctttgagtagttaaaaatagaaatattccattttttcttccttctcgtgctaacgtagccagaggagaaataaaatcatcttgagcatctttttctaaagcatatctgtgaacttcatcaacaaataataaagttggatgttttgtcatatcatgatttaataagaaattacttatatagtctacaattacttgtcctaatccaattgaaaatttggaatcatttaaacgtatatataatgatatgtcattaccttgaaattctaacatttctttattaaggtctttgagtatctttttacctttatctgtttctccaaaatccttatcttgagttttactatctacgtttaaaaataactcttttagattatacgtcttaatcaaatattttactttacgtattagccaagaattagctccatatgtaaaataatcaaactggtaggttccttgttttatacctttattccaactaagttttaaagaatctttctcaatttgtttatctaaattgtttatatcaaatgattcattaaaaactttatcagattcccactgaatctgaagatgcttgtactgttcttgatttgccccttcacagtcaagaatatcatttcttataaatctattctctgcctcggttaaatttaccttatttaaatgctttttatagtattgaacaaattttaatttttttattgcctctaaaagctcaatcacttgggaattatcatttggcctaaataaagaaatccattgttcatcagtcaaattagcagtattcaagaataaatttttccctattgtttttaaattaacctcattttttgaaaatgcatctttatattcaccagttggatctataatcaaaaattttccttttagcttttgatatttatctaaaatcgctaatgcactagttgatttaccagaattcgttgctcctacaatcataaaatggtgattaaataatccatcaacactaattttgaatggaatagctttcttttcatttaaattaaagcttgaaaattcaatttgattatcccttttattaatttctaatgaatttatacgcgtggtgctagttaaatcgttttagttaataaaaaagtccaatcttgttagactcaacttgtataataatagaaaagagcctgatctgattgaactgccttaagcttaagcgttttagccaccatttacaagttagttttaaagatttagtgataatttgtcggcactggtatcgtttgtatgcaccggctgagtttactcatcggcgaaatattgatcaaattaaaactacggacagtctgattttggctttacttatctggcaagctaagacaggaattgaatcacaaagaagattctgtgaatgtttcaattgtttatcacactcacgttttaatcgacgttcacgtcagctattgcaattgatttatcagatacggcaagaaatgaataaaaaggttgacctgaatggacatttcttgatcattgacagctttccggtacctgtttgccaaccaattcgcaactatcgtgctaaaatttttcgcggttatgccaacattggttataaggccaccaagaaaatttacttctatggtttcaaagttcatgccattgttagcgatgacggttacattcttgattatgtcgtaacaaaagcatcagttcatgatgccaaggagacagttgaactgctggaaaatgcccatccatctaattactatcttcttggcgacgaaggctatttaggcaaagaactgcatcaacagctaaaacaaatgggttatgaactttggacaccatatcgtaaaaatatgacaggagctaaaaagcacaatgatcatcaattgatggctattcgcagaacaattgaaagcgacttttcgcttctgacctattacaatgccgagaacaatcgagcacgtagtctgataggctttcaaagccggttggaaattgcaattttagcttataatttggcttattgtctagaaagatttaactagcaccacgcgtgaatttatatatttcttaatagcttcatcattacagatatatgccttatcaccaattcctactgttagatctccgggcaatacaaacgtatttttatcgtacattgccattagtttaatttcaatatttgggtaaataatatcatcattattttctattactgccttatgaatattatcagtattattaatcctagaacttattactttccctaagaaaattggagactgtaaaatagtttgtgtaaggatgaatgattccttaaatttatttctttaaacattagaaaaaggagttcctttctcgtatgattggtttgaacaaaaaaacacatacagaaagaagaactccttcatgaatgattttaccaaagattttgctcaagctctattcaatccagacaaaataaatgatttattgcgcaaagagctacaacaggctgttaataacttgttagaagctgaattgactgcctttctgggctatgatccctatgccagaaatggctggaatactggcaactctagaaatggtgcttatttccgcaaagttgatacgcaatttggcccaattgaagtgcaagtgcctcgggatcgcaacggtcaatttcatcagcacacgctgcctggctacaagcagcactcggatatcttggaaagcatgattatcaagctttactccaagggcgtgaccaccagggaaatagccgatctaattgaaaagatgtatggcagccattacagtccagctcaggtatcaaatatttccaagcagatgattccaaaggttgaggcttaccacaaacgcaagctaagcgacaagtttttctgcgtctatttggatgcgacataccttcctttgcgccgagaaacatttgagcgtgaagcagtctatattgccattggcatcaagcctaatgggcacaaggaggtcattgactactgcattgcgcctagcgagaacattgaagtctggacagagatgcttcaaaacatgaaatcccgaggcttgaagcaagttgagctttttctttctgatggtgttgttggcatgaaaacagccttggccaggacttatcctaaagctcattttcaacgctgtttggttcatgtcatgcgcaatatctgcgctaaagtacgcgtcgacgatcgtgaaaagatcatgaacgaattcaaacaggtgcatcaacagacaaacaaagaagaagccacagctgtcctgcatgacttctataccaaatggggcaaggtttacagccatgttatcagaagcttgaaagacatagaaccagatctgctggtcttttataactatcccaagcagatcagagcttcaatttattcgactaacatgattgaatcatttaacaatgtgatcaagcgcaaagctaagcctaaggcagagtttccaactgaacagtcgcttgatgcttttattggcattcaggcaatgagctacaatgaccgttatttcaatcgaattcataaaggctttggtcaggttcaggacaccttagaatcctactttgattaaataaataattaaaaaatcaatttacgagaaagaactatttacacaaaagatttgacagtttcgaaaattgtgccattactatcaatcaaaacatgataattaatagtattagggcgtaaaacatcactttgattgaagcgatacttcaataaactcatgttttctatttgaatattagcaaaaatagaagatacagtagatattttacctaaatagtattcacatttgtctacatgcaaatttttgtctgaactatcaaaaaagttatctatcaaactcatagttatcccacataataagataaatcataattataactacacattgttgctttaagaaaagcaatattatatcctcgatctctcaaatcatctaaatcactccagttgtcattaacatcttcttgttctgtttttttatcaaaattatgaatattataatcagtaatcaaacaatctaaacttgagttatgcttaattgcgtttataatcattctacttatgtgattatcaccaaaactaaaacccgaagtaactaataatgtattaggttggtgcaacttattttgaaatcgagacatgagatcaaaatagggttcctcatagctctgagcatatttattagaacttggaaaaatcatttttacatgattactgttatctctaatcgtactttttacctcttccacagtcgatttagtaactttattttctttttcaatccaattaatagacccatgaattttaagaagatctataacatgctttttatagataacttgtttagtattaatattgttaacttctttactcaaaacccactcatacatatcatcattgaattctttattatttccaaattcaaatccatcaaatattgtgaagttatctttttccagagatttttcaattgctaaatcataatttgtagtcgcaaccatcaatttactgctatccgaatgaattaaattaagcaactttaaaatcactttatcatgcttaaatggcattttagatgtactatcgaaattataatcaactgaatcaagtattgatagtaaaataaatctttttaatttttttgcttgtgataaacttggatttctgacttttttaccagacatctctgcgtcttgaatatataaatttaaatttgaaatatattcttctaatggaaaagaaaaccatgtactttcatcatcaaaattaactttttcaaatttttcttgttgatctttaggtaaaaagatcttagcatccttttcatctaaatattcttctaaattatttgttccataaagctgattgaaaatattccatgaaatatcttgcatagtctttccataatttgaattaatatttccattctcattagttacaactgaagctccggcaccaactaatagcacaacattactataatctttacttataaaacgcaaaacagcccttttgagaaacttatgaagttgcttttctaaaaacacaaaatcatgatcattatcatcatctggatttattttatctctataaaatttacttagtgctttctttttatcttgtttattatatttatcaggtaacgataactctatatctatttctttatctctgtacaactgcatacttaatctcctcgtattatataaattcatctcttaaaagttaattctaatatataaacaaattgtcaattttatcaacaattctattctgctccgctaatggtggaagaggtaatttcaaattaattaatttactcaaatatattcctttttgggttgtccctttcgcattagcaaaaatttgagttttaaacattgctgaaattaaaacataataaagaaacttacttaaaatattactactaataaccgcaacacttctttgagctgtaaaaagtttatcagtatcaacaactgcagcattacctaacgagcctacaatagtgagtaatacatctccctttcggatgtttgttcttttatcctcttttaaaaattgatcttcagaaacaaatctatttgataaagaaaaatctatttttccttttttaatgtttattgcagagataacttgttttccttcatgtgaattcggtgggggattatgcgtaccatcagtaatcctttttgcaatattccccaatctaacccattcccaactatcaggaatatcaaacggcttttcctcatcagtgatcggaggcaacggcttgctcttcttgatctccttttccttgatcatcttccgcttctcagccttaatcttctctagcaaaacactagctggttcatcatggggatcttgctcgactaattttccacgcattgccaaatccagcaccttcgacttcagcaaagtctgaagttttgcgtattgttgagtagaagattcgactttgcgaagcaaagcgaatagctgcgctattttagcagcgattcgactttgcgaagcaaagcgaatagctgcgctattttagcagcgattcgactttgctcttcaagtggtggaagtggaacaagagtttctttcaacttttttgaattaattgttggtacagcagatccttttacaaagtcttttatgtccaagcttaaaaacagatagaatatgaacttgtgatttaagtcattgtatggtattaatcccccagtattaagatcaaccaatgaatcttgagacaaaattcttttttttgcggttaatatagctccaccgtttttaggaaaaataattgtatttttaggcattacttgtcggctatatttttctccaacccaatttttcacgttttccatatataagttattattattcatatctttaaccttaaagtatggataaatattatcactacttatgtcttctttcttgggagtttttccattttttagtaaacctacatcccccaatctaacccattcccaactatcaggaatatcaaaaggcttctcatcatcagtaatcggagcaagcggcttacttttcttaattttcttttccttaatcaactgctctttttcagctttaatcttctcaagcaatacactagctggttcatcattaggatcttgtggcaccagctttccgtgcatggccaaatccaagattttttctcttaaagcctgtgcatcaaaatctaaagtattagtcttcatcgtcaattccttctaacgccttattaagttccgcaattgcatccctaattgccttagacttgtcattcatctcatctaagatttctttcaacgaacggttatcgtgctcttcttcatcattcatccaagaaatatcaaggctagtattaggacgcttcaaaatttcatcaatcgtaaacttgcgccatctaccgttagaattcttctctttatcccaagtttcttttctctttgagcgatcgtcaacgcagaatagtttttcaaattccgcaaaatccttgtcacttaatggattacgcttaccaaatgaccgcatctgatgacgcatatcataaatccaagtttccttggtattatccttgtcactttcaccgcgagtaaagaataatacattggtctgcacaccttgagcgtagaaaatcccagtaggcaatctcaagatagtgtgcaagttgcacttgttgagcaagtcttttctaattgcttcgccaacaccatcggcaaacaatacattatctggcacaactacggctgctctagctttaccattgtgtttaagtgaattgtagataatctgcaggaagttcaattgtttattactagtcttataagttaggtcgtcacgacttacactgtcgtcactacccttcttggtaccaaatggcggattagttaaaactacatcaaaatctttcatccatttaccatttgaagataatgaatcccctagttccaatcgtccatccatgccatgaagatactcattcatcatggctaaacggtgcgtggtttcaactaattccataccagaaaaagcttcttttacttgaaattcttctttatctgcggacaaggttgaataatcatctgtttgatcttttaaatatctgtcagctgctaccataaagccaaaagtaccagcagcagggtcattacagcgatctccaattttaggctgagtcattctaaccatcatgttaatcaacacacgtggggtaaaatactgacctgctccagatttgacttcgctggcgtttttctccattagaccttcatacaaatcaccaaggccttcgtcacgagctgaccaccaatcaagtgcgtcaatatcttttattattttttccaggtcagcaggtttgtgaattgaagtagaagcatcagcgtaaattgaattgattcttggactattaaccacttcaggattacctaaatcaagtaataattggcgataaaagttacttaactctagtccttcctttgaaacaagattatcccattgatatttttgggggatatcatcctgttcaccttgttccttactcatttttaagaataagatataagttaattcagtaatgtaatcttggtaactgacaccatcatcacgcaaaatattacattcattccataacttttgaacgatttcttgattgttcacttaattttgctcctttaaaaattgtctcttttgaagatttccggtagatatatttgaatattagtaaatggatcatcattaatccagtcactctttttccgatacaacttattggcgtgatctactgcatcttgcactttatcaaaaatatattctcgataactattacctttaaagcgactataatcttgattaaaataggcagatctagacagtttctgtactagctcttttctagtataagaacgagtgacactttcaaaatgcattaaaatccaaatttcaaagtctattgaagaaaacataatagtaatatcattttttcgagcaagtttagcgcatttccttaattcatctttagaatgctcatctctatcgaaaacaacataagttttatctaaatgattatatttgccaaacttaactgctttttctactagacttttaccagacaaatctgcagcaactattttaactttaatatttgctaaacgatatttctgcttaagcatagtaaaatattgtttttcagattcaccttcacacagaattccaataattggattagacttagtcttatttcttattcttcccatgctcatccccatatttttcatgaatcatttgcaatacatctagcaaaccatctacatctattacaggaactgcaccgaatcggccttgtaagtatctcttagcaaacgaaatatcatgtcgacctttattacgtgcatcttcaaagtcaaagattgatttcaaatcactaattccgtgaaaatccttgtctaataaataaatttgatcaattcttaaatcgctgtctaatagctgaatatcatgagtagtgataataaactgattcaaattttctgttgaattaaaaatacgaactaaagcagctgcaagttcaacatgcagtgaatcatcaaattcatcgattacaatcgtcttctcgttaccattcatttgagcaagcatcattgctaatactatataaaataaacgacgtgtaccaacagactcttgtgttaatggaagttccccagaattaataacttcattttgatgataaatcttgtgaaccgtatatagttctttagttgttttaggataatcaatatttaaattctctacaatcttttgtaattgtggattcaacggattagtaggtacttctctaattctaatatcagagatattaaaatccgcaaaacttaagaatgagatcatttcttttttgaggtattcatcttccatcaaatttaaaagttcgtcaggaatatttactggatagccgctgccaataaaaatcagatcattaacaaaccacttatagatagcaatacaatctgcatcattttcagattgtgctaaatataggaataaagaattatctctaagcttaggaatgctgtcttccaaaagcttgttagagacttgaatgtcatttccatttcgagaaaaaatttctttttccttgttaccactaattaaggttaatgcttcactggtaatgctctctcgattgtaactaaatgaatagtcataaattttgttttttaactcaagcttcacttcaaagtaagtatcttcaatcttggacttttcatcaaacaaaaaaggataataatttaacttatcagttacggcttgagttggacgtgttactattccttccattgtttgtaaagcttgaatcaattgagacttacctgaaccgtttggaccaaataacagtaagctttttaataatgatggatttttacttgagaaagtattagtttctttcaatttacgtagtctattgcctgtctctgcagacaaggtagtgcgctctctaaaagaagcataatttttaacagtgaactcgattaacatattgtattcctccgtgttaatttaagtttagcacacgcctttttttatcacaacttttcgtgattaaaagcaaaaaataccagtaatggcatttttaaacatataaattctcattcaacacgtaaataatctgatcagcattttctggaaagatcttcttaatttgcttataacccccgtgacgtttaaagaaatagttatcatcaaaggctttctcagcatttggccccaatacagtagatgaaattaattggttctcaattctcttcaaccatttcttttgaggaatagtccaatcagctaaaccataaactttttgcatggcattatgaattctaacatcatgatccaccaactcagatccagccgcagcttgtctaatgaagctaataatatcggcagtggtctgaacatggttaacgtttttccatgcactttgcaaatcattttctttaaagccattttgctctagcttaagtttaatatttttgagttcatcaaaagttaaatccttcggtctagtagctacaacttgtaaggctggaatagtattgacgttttccttaacgaatttattgaagttttcaatataatccgctggtttttgattgccatgcccataacctcgacttacattaattactttgtctactgcgtctgatattatttgcttgggtttgacaggtttgatgtgatctaactgctcaaacttaggccattgctttaaaaattgggacttatctaacttacttaattcacgggcccattgatcaaccgaattaatctcagctagatgttggaactcatcacgtttagtatcatccaaacgtttaatttttctctcaacggcaccagccatatctacttgatactgagcggaatcctcatttgtctcaaagaaatcatccttgtgatttaagaagtagtgaacattatgtcctggatttttaacaacaggcttcatgtttgtcactttattcattgcttcatagattccgacggcatcataaatcgtaaatttggatttattaatttcgggacaaagtctggttgcccgtcccaacatttgctcatagaggattcttgactgaactcttcttaagaagacaatactagtaatttgcggtacatcaattcccgtagttagtaaatctacagttactgcaatattggggttggtttcattcttaaagtttttaatttcttgattaggatgccgaattgaaccagtaattttttcgatagcatcgtcatctacaggattactcacttttttgaatgcttttttcaataagtcaacaaccatatcagcgtgttcatcagttgccgcaaagattaaagttttacctaaatttggatcatttggatcaagatatctttgagctaattcatcacaaactacttcattaaagctacgtgtgataactctcttattaaagtcttttacatcaaaattcatattatcaggtaatttttctttattgatagttttttcatcctgatcaaaaagactaacttcggcaccctttttaaaatgaatcccttcttgagacaattgagtttgaataattactggtgcatcatgatccactaaccagccatcgaggacagcttgttggtagctatacgaatacaccggtttgccaaaaatatcaatcgtttgtaaagctggcgtagcagtcattccaatagcagtcgcatcaaaataatcaactacacgtctatattgactaacataatcttcttgactatagaattgatattctttatcgctgagctctttatcttctgcataaccacggtgggcttcatcaacaataatgaaatcatattgaccaacggatggcttatcatcactgtcttcactgaaaaataggcgtttgatcatcccctgaaccgttgcaatttgaatttttgttgatatttcaggtgccttatcactcaattcctttaatccataaatggaagaaattgacatcgtacctattttattatctttaattgcattggcagtctgctttcccaatgaattacggtcaactaggtaaagaatacgtctagctctcttatgcttaagtagtctgtacatcaaagcaattgccgttctagttttaccagtacctgttgccatggcaagcagaatacgcttttttccatctttgatggcattttccatcgcttgaattgcagcaatttgatattcacgatgtgcaaaatcaggaaaatcttgatcatctaccaagtcttgatttgcttcttctttatttttagcagaaagcttcaacgataaatcttctggcttatgaaattcctctagagcatatgcgctttctttatgattacgtgcatcccagaaccaaataccagatttttcctgatattgtttaagatatggacgaccatttgcagtatagatgaatggaactttgtaatcacccatttcatttgaaactagacgataatctgatctaaacggtacctctttagaatattccttaggctgtgccatttgccctacaatatcttggtcccactttttggcctcaacaattccgtagaactccaaacctttgaataatgcataatctgctcgctgaccattaggtagaacccattcagcaattgccatattgtgacctttttgcggttcagttttctgcgtccaattgttcaatttttgtgaatctacttcccagcccgcatctcgcaattgttgatcaattaactgacgtgtttctgcttcagttaactcatgttttttagcaaattgaacgttaatctggcgtctgcgttcacgctcttcaggagaaattatgacttcctgcaccctattttgttgtaattgctttatcttttcttcgagagctttgattttatcttcttgagttttaattaaagctttttgatcttgtggctcaacataatctgcaactttatccagagaataaacttctaaaaaccatttccataccaaataagcactctgatcaatttcaagcgcaatcttttgggtagcaataaaatgatcgtcatgcgttgccttgttccgtcttaacctgatcaaattaagagcattcaaaacagtaggtggatattcattcttagaatatgccattttttcaattcgttgtttttggtttaattcccaatcacctaaatcatccaaatgcatgatttccttagttaattgctcaccaaaagttccgaaaactgtcaaactacttctaggatcagagtaaattaagctttcagcgctggaagccaattttgcgtattcttgataatctttttgtgaagtttcaaagttagacattgtttttcctctaaatattaaagtaaatatagttttattctaccccgaagccccatttaataacaagtagtgtaggtacaaaaaaagaagcaccaacacagtgcttcttttaacataaactaaataatcaatcgaaccctacttcgctaaaacatattcaaatcccaacatattggtatagcgattactacctatcttaatgtaatcatagcctttgatcctcttggtgccataagtttggacataattctttgtcctggtattctttgacttgatttcgtcaacttttttaccctgggcatttaccacaggtgttacagtttggacagtgtagtaacgtttgaccacttttagcttagatgcttcgaagttgccatacttaacgtatttatttgcaccaatcttgacatatttttgccctttaatagttgtaatggcttgaatcttataagaagtattcttcttcaacagctttctagttttcacacctgcagcggtataaacgtatgcattactttgcaatttctttttcttgccaacagtaatgccatcagtgattaatgggctaatatcgactttgcgctttctaatggtatctgaagaatagccaaaccaaaatggactcttcttggtaacatcccatactggacgagttgttggatattgccaattacgtttgctgttataaagttgaacgttaagtttgcctgtaacttgcggctgatagtaattgtagataagattcaacactttttgaacctcataagtagttaactggtcagttcgtctaacaagtaattttttaccatcaagtgctttggtgctattagttaaaaacttttctgcttgactaactgcaatttcactagcatctgcatcactagcaatagccttagcttgctgtaaataagttgtaaattcaatcttcttatcataatcagctaactgatagcgatctgtcttttgcacattttctgcagtggagattgcagcagtcaacgatgctttgttagttgccactttagcaagtgactctgcttcgccagctgtgtttattggtgtaagcttcacaccttcaacctttttgacatcactagctaagatatagccttcattatctaacttattagtcttagcattaacttcacctgttgtatggtagaaaagttcggctttcttttcacttggcacccaaagataaagggcttcgttaattttatggttgctatacattgcagtttcttcaaccgtattggtataaaactgtttagatagctcttggctagttttttcaccgtcaacattgtacaaaggaatctttttatccaagacaactttggtagaatcggccaattcaagatctgaatgattctctaaagcttgtggcaaattcagatcatcttctgatacccaataattagtgcccttgatccggtagtatgaatagtgatcatgatcaaagtctgtcaattgttgtgggaattgtcccgcataatcaactgtgatcttttgtcctttcttcaattcaatattatttggatctgtaccccaacctgttgaattaacatactttgtaatggttgaagtattcttattgaccgttacggtaattggtgcatgagtagtaagacgatagccgtcaatgtaaccgatgttggccaccttgatataacgaccggaacctaaataatagtagtcttttccattaattatggtataaggaatgcgatacttacctttttgagcctcataataatactttgctttactactagtagttttccgcttaccagcatatttgactacgctaccctttttgacaaaaccaacttttttgccagacttattgtaaatattggcattaaaaattgccgttaaataagcagggccagatattggcgttacataatctgaagaaatataaacattcttgcgtaaaggatagtataactcaccagcactgtagtcgcctggatcaaccgtcttaaaaaatggttttccatagtatttaatcgtgctgcctttcttaggtgcagaaatatgatccaaataattgcccgagcgattgtacaacataatatgtgaatcaatgacttttaaggaaccagttgcattgcttttagtagctgcggcaactgatgtttgaacgtttgaagttagtggtgctgcggcaattggagacacagccaataacgcagtagaaattaagataagttttttattgattttcataatgaaccttcgatctaataaatgcagttaagatttgatcagttagtactcatatcatcattatagcagttatagttatttattccttgatattgagcctatcaaaaaagagatcgaaacccagtgtctcaatctctttcgattttattttgttttcttcttacgagtccataatccacttaaactcaagccagacagtaataaccctaaccatgaaagatcactatcttgcctaccggttgctggtaaaacagacttagaggccgatctcggcgtaatttgttctactgtatcgtttttcataatagaagtttccgttttacagcaactaatctcactaccacttaagcttcagtttatggctactttgctctacctgtaaaaatgaatcaacgtagcgcttaaaaccaggtaaatatttggcaatcaaatgatattctcgtgaattaacaatttctttcttttgggctgcagaataattactttcacctacaaaaaagttccaattcaattgatctataaattttatgaccacgttagcatcatttttatctgataaagcttgcgcaatctgatttagttgcttttcatccaaactaaaaaacaaatgcttcaaatattgcgaaaaatctgttggcactttttgcttttcttccgcagttaaccacgattccattttgaaggaatgcacctgatattgcatccccgcttcgtctaaatatagctgaccatattcctgcttagtcatacaaaaacaagctcctgctacctccgcaattggtcgattagcaaacggaccaataatattctgtgcgtgcatatggccagaaaagactgcttttacattatatttttgtaataaaccttgcagtgcaagtgcattatcaagaatatatccctgatagattactttattatggcgatacagattatgatgcataaagaatagcacttgttgctgcttttgctgcgcatcaattaattctttttcaatccagttcatttgagattctgaaattcgaccgttagtaatcagatgagtttgtgattcctgcttgccataaatatttgagtcagccaatattagtcgatactgcttattcagattaacgctataagccagtgaatcaggatcttcatgtaaagcataatgataagaatcagcaaagatctctttccaaatagctgggctaatttgcggggtgtaatcttcatgatcacctttaaacttgcgagcccagccgtcaaaaatatcatgatttcctggtaaaactaagaatgcaattttatttttagttaatggcttaaaaatattagctaaacgttctcctgatattttagcgccattaaaggttacatcaccagtaattatcactgcagtgggcttctcttggattactttacgtacaaacgcggtcaaagcaatctcctgataatctaagtctttacctgcactagtgttgcgcatatgctgaaaagcaagaccatcatcatgtaaactatctgcaattagatgtgtatctgataataaccaaagaattggcttctttttactagtaatcacaatttacctttttcaaaaatctattttcactttaactactcatcattataccaacaaaaaaggcatccctgctagggatgcctcattgcgataaaatattgaattaagcgtcgatttcttcgatcttaatgttaactacgaatgcttcaggagtatcagtgcctgaaacgatcttcttagcgtaatcgtcgccttcatgaatttcagcatgtcctaaaacacgaaatgccttatgagtaggaacatcagcgacaacaatagctgctactgaaccattcttcaagtttgcataagcagttgacttagtcttttcaagatattgaatagttgaagcatcaattgccttaagtgaagccttaggaccaacttgtggcacaccgttagcattcacagttgccatgtatggtaagtgtgagttaaaaaattcaatttgttcatcagtaagcttagtagtatctaattttttcataaaattcgacctttcttttcttaagttcattattaattataagatatttgctataaaatagctattattttgccttagcttaattgattcttacatttatcatacacaagatattgtatttaataaaatgtgtttttaattaaatttctcttgctactaatatttttattaagtaaacagtcgttgatatatcaatgcttataaatgctggcaaaaagtcaaggattgaattttattttttagccagtagtatattatcttgcattagttaataagtgatacaagatattgtgcttattaaaataaaaatatattttaaatttcatttttattaatgttatttttagtgaggagaattcgatgacaaagaaaggcttaacaaaatatttatcaattggtgcagtaactactgcagcattatttttagcagcttgttcaaatcaaaagagcactacatctgctaaaaatagtaagacagaaattactatgtggcacgcaatgaatggtgcacaacaaaaaactttgaaacaattgactaataaatttgaaaaagaaaatcctaacatcaaagttaagctagaaaatcaaggtaattaccctcagttacaagggaaaattacttctactcaacaaaatcctaataacttaccaacaatgactcaagcttatcctggttggctttatcaagctgcgcaaaataagatgttggtcaatttgactccatacattaataattcaacttatggttggggctcagtagccaaatctaatattcgtcctgaattaatgaagggtgcgcaaattaatggcgttcaatatggtattcccttcaacaaatctattgaagtcttgacttataacaagaccttacttaagaaatatggtttaaaggtacctaaaacaatggcagaacttaagtctgtttctaaagcaatttatgaaaagtccaaccataaaattgttggtgctggttttgataacttagccaactactatgttctaggtctcaagaatgaaggacaaacttttggtcgttcaatcaagttagattcggctgcctctaagaaaattattaacttctacgcagatggcgtacgcaatggctactttagaactgctggtagtgaacgttacctctccggtcctttttctaatgaaaaagtcgcaatgtacatcggtacttcagctggtgaaagctacactaagatgggtgtaggcaacaagtttacgtacggcgttgctcctcgtcccggtgaatacactatttctcaagggactgatctttatgtctttaaccatgcttcaaaagcacaaaaaaatgctgccatgaaatatatgaagtttttgactagcaaatctagccaattaacttgggctaatgagactggctatattcctgttaacgataatgtcttaaatagtaaggaatacttagacagcaagatgaaattgccaagtgtcttaaaggattcaatgaagcatctctacagtgttcctgtagctaagaattctgactctgcttataatggtatgaatcaaattatggaaaatattttaattgctgcaaataagcatcaaaatgttaatgctcaaattaaggctggtcaacaaaaattagatagcgcttggcgtcaataatgatattaaaaaagcatccctcttctctattttgattagggatgcttttttgcatttgcaagagttgaatttaatttaagcactcacatagagtgcgacgtgcaaagaacctacttttgactggggcaaatgtatttcatccaatcctaaatatttggcttcatcaactattatactatgtcaaaagtatataaagaagagttaacacataaaatacaaaacaaaatcagtgcgaaactccctcatttttatgttcacatagggttcgcactgatttttttcttaactcaaatctttcttagtaactgccaaatgtgccttatcattgataaagacccagattggcaaatctattcctgttgaatcagtcaaattatttacaatttcactgataaaaagctggaccattttcttaggcggttcagtaaagtctcttctttgcggcgtgtaccataaacctgtgattggctttttagtttgtcgatcgaaaatacaattcagggtttcatcatattgatcaaatgaggccttgtagactatatgtaatggatgatgtgccaagttctcgactaactgataacgcatatcgtccgcaatttttcctttactaatcatcattaaactggtaactggaccattttctttttcaaatttttgcaacttgccttgtttgattagcttcttttcaactgaaataaaactatcagaatcaactaacatcgtttttccttctctctactatctattataagcaagctgtcaattactttacataattttaattattatgcaaaaaaagaagccatgacctgaaaatcatgacttctcgcgaattcctcgtccgtaaatcgaaatcttcacgaacatttttaccttaacacaattaattatactagtctaattaattttaattactaaagcttcatatggcttcaatgagatattctctcctagtttgccatcttgtgcagaataattgctcaatacgagttgataattcttattttgatattgttcaggcaatggtgctacatgatcagtaccatagaaattagtgaaaactaatatttttttagcttcatctttcaaaaaacgttcataggcaaaaatttgtggatcatcttttaaaaacattctaatatggccatcagaaatcagttgttcgtgcttacgcaacttgatcaatttttgatagtaagcaaaaatttcaccctcgtgtaattctttttcaacattaattctatcttgatctgttggtaaaagccatggctttgattcactaaagccagcaaatttactatcatcccagtgcatcggcacacgagagttatctcgtgctttagtttttactattgcaaatgcttcatcatcgcttattcccttttgtttcaatgccgcaaaagcatttttagcttcaacatctacataatcatgaattgaagaataatgtggatccatcattcctatttcttcgcccatataaatgtaaggagttccgcgcatacaatgtatcgcagtagcaagcatttcggaagatttctctcgatatttaccagtatcaccaaaacggttaagggcccacggctggtcatgattgttccagaacaaagcattccaaccgccaccttgatccattttttcttgccattcagtaaataagtgctttaatttcatgaaatcaaacggctctttagaccacttttcaccatttttataatcgacttttaaatgatggaaagtaaagaccatggacaattcatgctcactcggcttagagtactcaatcgaattagcaatagtagttgaagacatttcacccaccgtaattgagtcaggatcttgaccaaaagtagagcgattcatttctttcaaatattgatgcactactgctgtatcagtataaagactcttttcctgacttggatcaccagttgaatcaactaacttttcatccttaccggtcacgttaattacgtcaaaacggaaaccatgtactccctttgaacgccagaagttaattactttgaacaattcttgacgaacttctgggttatgccaatcgagatctgcttgagttggatcatataaatgtaggtaataataatccgtatcaccaaattttgcccaagctggtccaccaaacttactttgccaattattaggcaaggagccgtcaggcttagcttttcttaagtaaaagaatttgcggtacttttcgtctcctgccaaagcttttttaaaccatatattttcggttgaacaatggtttagcaccatatccaacatgacgccaacgcctatttcttttagctttttagttaattcctcaaagtcagacattgtgccaaagcgaggatcaattcggtaataatccgcaatgtcataaccgccatcattctgaggggatacaaaaaagggattaaaccagatcatatcaacgttaagcttcttgatgtaatcgattttagcgatgatccctggaatatcacctactccatcgccattagaatcataaaaagatttgggataaatttggtaaattacttttttgcctaaatctgtcatttttatctcctataacttaattttctgtctacgagcaaagtcaataaatttaaactttttaggattatgaaaggataaagttaactgaaacagcgttgtatctgctaaaaaattatgactagctactagtactgcttccttactatccaattgcaatttctcttgtaaatcagcatcgatttcttctaccgtaattgccttagttgcataggatatatctagccctaatttattttctaaataattgtagattgatttttctgcttcttctggcggcagctcagtaattggtggattaaataagaaatcacagtccagcacttctggttcatcgttaatcattcttaaacgttcaacatagatcccagcatgcttcttttgttcagggaagaatttcttgaaaattgccggcaaatcatcaaccatttcatcattaagtagcttagtttttgcattcattcctaatgatttatttaattccgcaaagctagaaattcctgaaataggaaacgaaaacttttccaaattaaggacaatcgaacctttgcccttgattttttggattaatcctaacgaggtcaattgctgcaaagctttacggactgtttcgcgtgacgcgccataaagctctgtcaattgattttcactaggcaagcgctcgccttccttaaattgttgatgtttaatcttagaagctaagtcttgagcgatcagttcagattttgctttagtcatcttgaccttgtcctttcttaaaatcatgttcattatatttttgatgtacgtacatgtcaatagatatatctaaaaactatattgcaggcatgtaatcattttcataaaaatctattgacaacttgtacgtacaggaatattataataaatgaattttgtgaaaacgcttttataggaaaggaagaataacacttatgaataaaaacgaaattgcattacttgctcctgctaatggtcaagtaattgcactaagtaaaacaagtgatcctatctttagcaaaggaactatgggtgatggttttggtttaacaccaactgataatacagttcttgcaccagttagcggcactatctcaatgattgctgaaacaaagcatgcgatcggaattactactaaagatggtctagaagtattggtccacatgggagttgatacggttggacttaaaggtgaaccgtttgatgtagtaattaaaaatggtcaggaagttaaagctggtgaccaaattgccacgatgaatatagagatgattaaagcaaaagatcttgatactacgattatgactttaatcaccaattcatctatgaaacttgatggcttagatgtaactgaaggtaaagcagaagctggcgatacagttgctcgagcttatttaaaggagtcaaaagaagatagttcagacaagaaactttcgtatgatgaattagctactttcattattaagaatgttggtggtaaagataatataaataacctgattcactgtatcacacgtttgcgcttttatttgaaagatgagtctaaagccaatgatgatattttaaaaaatcaacgtggcatacttgacgttatgcatgctggtggtcaatatcaagtcgtaatcggtaatgaggttaccaatgtttacgatgcagttatgaaacaattgcctggtcttagtgacaatccttcaccttaaactaataatcaggatgatggtaaaaatcctgtttctagagcctttagtaatctaattggttttattaccggctcaatgagtcctgtaatcggtgttattgcagcatcgggtatcatcaaaggcttacttgcactactcacccttccacaacttggtgctttacttagcgtcaagagtccggtctatgtcacagttagtgctatggccgactctgctttcttctttctaccagttctagtaggatttgcagccgctaagcggttaggatccgatccaatgattgctgcagtaattggcggtttcttagtttatccacaaatgattacttggggcaagagtatgacgacaatgtttagtcttggatcttggaacttccaattcttaaactattcctactctatctttccaatgattttagctgcttggctagctaaagaatgtgaacagtggttaaagaaagttttgcctagttacttgcaaatgatctttaccccattaattactatccttgtagtttcaactatcacattagttattaccggtccaatcattcaaggagccgcaaatggtatcgcagtctttattaactggctagtatctgcatctggctgggttggcggcttaataatcggtgccttttatcagttattggttatttttggtcttcactggggcgttgtgccactagttgctcaacaaattgcctcaactggtcaaagctcattaaacgcaattatctgcgcaacaatggtttcccaaggtgcagctgttcttgcagtcgcaatcaaatcaaagaaagcagacatgaaagagctaggaattgcagcagctatttcagccttctgcggtgttactgaacccgctatttatgggattaacttaagatataagaaggtctttgcttcaggttgtattggctcagccttcggtggcctagttactggtttaatgcatggtactatgtatggctttaccggtggtctaattggcttctcaagctttttcaacccggcccatcctactcaactaaatagtttctatactttcctaattgccagtgctgtttcaattatagtttcatttattgcagtttgggtatggggatataatgacaacatgactatgggtaaaaaagtagccaagaagcaacgcccaggttcagctaaataaaaatttagagcaaaataaaacgatgaatcacccacaaaggtaaattcatcgttttttgtcttatttaagcagcatcagcaatccgttgtgcctcaattaattcagcttttctgatatcacgaggcaagaactgacgaatatcttcttcattatagcccacctgcatccgatggtcgtctgcaataataggtctctttaataatcctggattctgagtaattaaagcaaccattttagacaatgacaagtcttcattcaacttattctttaattgtttgaaagactgtgaacgagtagataaaatatcctcagttccattttcagttaaagacaacagatgaaggacatcttctttagataattccttaaagacgttcttttccttgaaagaaagatgatatttgttaagccatgctctcgccttacgtgaagatgcactacttgttgacatataaagagtaatcatacaatacgcctctttctaaaaaaactcgttaacttctcgtacattagttctattatataacttactttttgatagtacaagctatttttacaaaaaaattgtagaaaatagtatacttaccttactgaaagaaggaatttgatgaattttaaaacaccaattgccgaacaaatgaggccgcaaacattggcggatatggtaggccaaagtgagttgctgggaccaggaaaggctttaagaaatattatcaagcagcatgttaatatttctttacttctctgggggcctcctggtaccggaaagacaagcttagctcaaattattgctaaagagaatgattatccctttgcttcctttaatgcttcaattgataataaagcacagttgaacaacattattaatgcttataagtatcagaccttcgttcttttaattgatgaaatccaccgtatgaccaaaaatctacaagattttttattaccttatttagaaaatggtcatgttctacttgttggctctaccactgaaaatccaattatgtcgattgtgccagctgtgcggtcacgttgtcaaatctttgagttcaatcctctaacagaagacgatattgcagctgttttgaacaaggcatgtactaaggtccttaaattagtagatcaccaagttgaaaaaaattcgttaaatttgatagcagccgcagctgatggcgacctacgaattgctttaaacattttagagactgttcatgcacttaatcctaaaaagatcaccttagcaaatgttaaatcgtttactaagcagcaattctttagctatgataagaaagccactaaacattacgattatttagctgcatattctgactctatggctggctctgacacagatgctgcactttattatcttgctattttgctaaaaaatggagatttagcttcggttgtacggcgtctgcgtgagattccatatacttatattggcttagctaatccgcaacaagtaactcaaattgttactgcagctaatcaagctgaaaagataggaatgcctaaagctaaatatccactaatgtttgcaacaatgttaatgtgtatttcgccaaaatcaggagcatttgaggaaatttgggaaagacttgatcaagatagtgatcatcccattcggtatcccatgcctaatagtttgcgtgactttcattataaacacgctaaagaaatcacgggagctggcctagctgagtcaccttttcaagctccgcatcaaatcgccaagcaaaattatatgcccaagggactcaaaggcaaacaatattattttccaaaagacaatcaaaatgaacgcagattatatgagcaatacctaaaattacatcgttatatttacggcgaagattatcaaaaataaaggacagcaatgcaattgagcatccctgtcctttttggttagattataaatgaagaaaattggtttattaattgcttctacgagagaagattctcgtccagccacctatatggtagttctatttaagttatttgttaaatgctaatcgaaaaaactttacgtactttttacgtattttattaccaataataacaaaaaagcagcggcgcaaatacagcgtcactgcaatatgtagcaagattatcaatgaagaaaatggtatttatcacttctaaggaggaaggatatttcatctagccacttatatcctaatgctacagtattaatttgttaaataaagcggctattaaatctaccaatatttttctagtggcttttcattcctaccagtgcgagtttgacgcaaatgttcagtcacaatattagtcaacacttcggctaatttatcaatctgctcaacagtcacatattcgtatcggccatgataattgccaccaccattaaataagttaggtgtaggaattcctttaggcgaaataaagtttccatcagttccacctctaaaggattgtacatttggctttagtccagacttgcgataagcatcaagagccagatttacaatatatggcttgtccttaatatagttgtagatattttcatattgttcacgaatatttacagtaaatctattgccatactttttgttcatctttttaactagatcgcgaataaactgttctttacggttatattcactttgatcaaaatcacgaataatcatgctaatgtcagcatgatcaacattgctttgagcatgtagaaccaagaaataaccatcatgattacgtgacttttcaggcacttgatcctgaggtaaattagacaaaaaatcattcatcaaagttgttgcgttaaccatcagaccatatgcttcaccagggtgaactacagtccctttaatatggatcgtaatctctgacgcattaaaggtatcgtattcaaaatctcctggccgcccattgtctaacgtataagcgaattctacattaggaaaatcagctggatcaaaatattgaccaccacagccaatttcttcgtctggaccaaaagcaacaaaaacatcaccgtgttcaatttcaggatgttcagttaaatatttaagcattgctaatgccccagtgattccagccttatcatcaactcctagcaaagtatgaccatcagaagtaattaaggtttgtccttttagatttaataagtctggaaactcggttggatcaagaacaatattatctttctcatctaggataattttctgaccatcataattttcgtgaatttgtggcttaatattaactgcgttaaagtctgcagtatccacgtgagcaaagaagccaataggcgttaccttttctgctgtgtttgcacttaactttccaattgcaaaagctgttttttcattatagtaagcatcaagcccaagctctttcatttcctttactagttccttggccagctcaacttggccaggtgaggaaggaatctgatcatgatgttcataatatgagcgagtattctttttagctaactgaataaaccgtttttcttcataatctaaattataaaaactcatatcatattccttcttacattaattccatcgtatcacttgaaactggctcagacttggggtctgaccaccacgactctttaactgttttgataattttaaaaccatgctttgcatacagcgctttagctgctatatttgcgctaaagacttctagcctaatcggccgtctaatatttggtaacactgaagctagcaattgatcaccaataccacgtcgttgaaattgaggatcaatataaaaataagctaaattatgtggcttatacgcagcaaagccagcaaattcattattaacttctacaatcctaatctcagaatcaaagaaattataccagtatggtgcttccttaaacggaataaaatatttctccactccgcctattttcatttcttgcaaacgagccgcatcatgaacccggcacaaatcttcgtaatctaaactttgaaaacatctagttcttacttgcataatttactcctttaggtgaaagagttaataaatttttatttttctttaattatacagaagtgaattatacatttaaagattttagttccaattcaaccagtcttcatcaaaaaacttaactttttcttcctgtgattctaattcctcttgttgcatcatagctattatcatctcatctttctatttttagaccattagttcgcataaaaattatatcaaacaaaggttcatctttctactcttttttcaaaaaaatattaattgagttagtaatagatgtgaattacctatatttttatccacaatcgcggtaatatcgggcttcagagccatgtttcacgtttattgtttacatttagctgtttttccaagtaatcaaatagcttttcactttataaaaattgtttcataaaaaaggatccaacttaatggatcccttaaacatgttattcgtaaataattacaggttcgccctttttaatattgttccaaacgcttcgaatctcacttggtttaacattaacacaaccatgtgagccaccctttaggtaagcggtcttgctccaatcagtccgccaagaggcatcgtgaaaaccacagccacttaaggtaaatggcatccaatacttaactggagaagcataacttgaaccatcatcattggtcccacgcaatgtacttggtgattccttatagtggatataccacaccccacgcggagtttgatcacccttagaaccttccatagtaccggtaacaacatcacgaagatgaacggctagtttaccctttttgatcagccatacttcttgctttttcaatgatacaacagcataagtatcaccaatctctttatttgaataaccatagccgtgaggataagtgctgtagcctaaaccgtaaagtgcatctgcaccatcaaaatttttttggcctttggcaaatgcttcgagaagtaagcgttgcgtctttttaacataaacgccccaaccccaagtcttattctttaccgttatggttttgcctttaactttattgccctttggcactgtaaatttatagctcttgtgtaatgttgaaacttctttatcaatttgatttaacttagtcgttaatttactagtatcaccaaattgatagcgattatctcgataagtcacattattcaataaatctttggcctttaattgatagtttttgccattaattttataagtaatctctgctttgcttaagtcagttagtttctttttagctgtagctaaattactagtagtaaacttataagtctgagtcgatggaattttagtttgttgcttcttaaaaaaggcctttgtctcggactcatctaatgattggactgtagtgttatagctataaaccagtttgttattttttaactcaacttgatttttagctttttggttaactttagccattgccttagtaacggttagctttcctactttaactccatcgattgtaacattagggttaaagtgagttttagcatatttttctgctgcagcttgtgttgccacacggtgattatgaatgccaaaacccgcgattactccaacgataattaaaactgcaatcgttaaaataataatattgtttcgtttattctttttctttaggtcttcgttcatactatcctaccttttatgccagtaataatatctttaatatagcaccttgcaaatttcgtgtaaaatctattgatttatctaaccttttttataattagacgactagcatcccgcaaagcaaaatataaaattggtgtacaaattgcagtagaaattgaattgattacagttgcaggcaaactaacaaaggctccaactaacgctactttaaagctcgtccccaccattaaagcttcaacaattgaaacgcaataagtagtgaatatcttagttacccctgcaataatacctaaaataataatatttcttttactatcttgatagtgcattcctcgataaactgctgtcaaaaccgaagccactactactacctcaagcatagttaaccatgatgttgcggcatagccatttaacaaatcaaaaccacctagaccaataattcccgcaatcataccattacgataacctaaatataaaattgctacagcagttagcgtatttccaaaatgaataaatgggcgtcctaccatagcaggaacggggattcttaacacccagatcccaatataaataattgccgcaaaaagtcccgttaaaactaaagcttgtaaagaattcttgttttctctaaatatctgcattattaattattactccatctcttcagtaaatctggtaaagctgctgcataatttggtcctagacgtgaatcttgcttgggtgtttccctgattgcttgtgcaacaaaatcggccgcaattgaacacgctttttctaaattttctttatgcattaaagcagcaaaaaatgcacttgcaaacaaatctcccgtaccaaaataattacctgggagttttttctgaattaaagaccaactatgatcggctgtaattccaacttccgcaattttttccttattaagtgaaataccggtaattatgacattcgagacaccaaattgactagataattcagccgcaaattctgttgctgttttcaatgaattactagttgcctttttgcctaataaaaatgctgcttctgtcatattcggcgttaaaatcgtagccgacttaactagatttcgcatctttattacatagttttcatcaatgccacgataaagttgaccgtgatcacccattactggatcaatcaagatcaatttatttttttgtttaaaatagctaatcttttctgtccaaaaatctaatgctcttttgcccaaatagcctaagtatacagctgaaaaatcaaaaccaaccttttgccaatgggccataatcttagccatttcattattcaaacttaaaaaagtattctcaccaaagccacccgtatgtgtagacaaaattgcagtaggcaatacggtcgggctcaagccacatgctcctaaaacgggtaaagctgcactaagtgatacttgaccagcacaagataaatcttggctaactaatacgccaccattaaccatcttttttactccaatcaaaaaaaccctgctttaagcttaacatgaagtttaaagcatgaaaaattttattttgcgctaaatgtattagccttgatatgattcaaaatttgataaccaatttgtttatttctgttttcatcattttgagtttgatttaagaacataatcaaaccattttgattatctgtagtcatctgaatccagttaccaaagtgagtattatataagttaccatatgctaacttcaagttatcattattcttcatatataaaccacctgaataaccatttgatgaacgtgatgttaaatgagtcatataatcaaagtctgttcgactcaaaatttgcccattggttaaaccaagttgaatacggtaatagtccattggagctgagaacaaattaccagcacctaccaattgagaagcttgagtctttttaacatattgagcccattggtaattcttttgattccaggtatatgagataccatccgtcatcccggctggaatatcttccaagaaataagttcgctttaagccaagcttattaataattcgttcctgcacattttgcttgtagctttgtccagtttcttgacgtataattccagctaacaaaatatagttggtattattgtatgaaaaattaccaggttgattttgcgtagttgagtttagcttattaacaacccaattaattgcatcagcttctgaataaacacgtcctctatttacttcagtatcagctgctgtcaatccagaagtatgcgtcatcaagttgccgacggtaatattatcagcaccttttaaattaggataccacttagagatcttagtatactgtgtaaacttccctgcagaaattaattgagtgataattgcgccggtaattactttttgcaaagaacaaacaggataaactaccttactgtttcccgcacctaatcgcttgccataataaccataaccataagaaatttgttgtggttgtccatcttttactataactacggtaccacgagcataataactagctaatgtatttctaacaaagctccgcatttcagttttgttataacttgctgcctgaactgtcgagctattggcattagcaattgccattccaacaggcattgaagcagctatagttaaccaaatggttgatttgattaatgttttttttaaattaatacgtttcgttttaaattcccccagcaatgttatgtaaattctacccataatattagcatttatttttttcattggggttacaattttgataaagaatcaatgagaacgtatacattttctttttctaatatggataattatttaaatgatcttgatcagtaatctgacgtattactttagccggtacccctagtgccaatgaattatctggaatatctttagtaactaccgatccagctccaataacgcaatttttaccaatttttacgccgggacaaacagtaacattgctggctaaccaacaattatcgccaacagtgatagctgctccatattcaatatcggctatttttccgtctgattgcttgcgagcatttctttgagttggcaacaaaggatgcaatggagtcgcaaatgttacgttaggtccacacattacattatttccaattgttacgggacaagtatccaaaatagtcaaattgaaattagaataaaaattatctcctaagtgtgtaaattggccataatccacttcaattggtccttgtaaatatacattttgaccatgattcggaaaaagacgatcgataattgctttccgttctacctcatcttcatcagtagtcatgttgtaatcacgtgataagcgatgagctaaactggaaatctttttcagttcttcagtatctgggcgatatggtttacctgccaacatttttttagtattttcttccatcgataaagcctactttctaatttaatcgcttacttaaataaatcatgtctactagctgatgtccagcttcaaaaatcggatgatcataattttttacaaaaaaatctttgatcttacctgagcgtttaaaaccacatttttcataaaaaggaatagttaaggggctatcacccgttccaacttgcaaaatttgatatttattttgatacttcttagcaataaaattaatcaaatgtttagcataccctttaccttgatcttctggataagtggctatattttttatttctactgtattaccattttcaaccgtaataacacattcagatctaacttttcctttatcaatcaagatatacataattccacgttctaaatagcgatcaatcatactctcttgttcatcagctaacaaaagtaagtctatatactgcttcttattagattttatctctttaatttccatgattattttccaattaatttaaaattttcgtaaattgcaataataacttgaacacttttgtttaggctgtttgatagatgcgatctaattctctttcaaagatctcatctggtgtatgataagccaagatctttcttggcaatgaattgcaccaagtttcaatattaatgatttgttggagagagtagttatgaatatagtcacctttaggaatgaatctgcgaataaggccattatgcctctctacagtgcctttatcacaagaagtatatggatgagcataataaactagtgatttggaaatatcttccagctgagatagatccgcaaattcagaaccattatcagtcgtaatagttttaaagatatcgttccaatgctcgctgtattgcttgcgcagacttttaaaggcattcattacactggcagctgttttatctgggattttaataattaggaactcacggctcatgcgttcagacaaagttagcagcacttcgtcgtccttggtcttatggcctaaaacaagatcacattcccaatgcccaaacacatcacgcttattaacttcctgtggtcgttgttcaatactgcggcctagcttcttcttatttttacgaatgcgatgaattttggtattgcgcttgagtttctctggcaaatcatagttatggatgtttaacaagccttgatcgacataattataaagcgtcctagtgcagacaatatcgttgctggtaaattcccctacagcagtgcagcgattactgcaggcgtcgagcgaccagccatcttcaaaaaagtgctgttggacgtaatcaataaacttatgcttcttaagaaaatccgatttgcgtccacagtatcgacgattgttttgataaacactctgaccttgttgggctttataacgtttaactttaccgtgatacagcttaacagcccctcgtttgatctcatagtgaattgtactaggggaacagccaatttctcgagcgatggaacgcaaagaacaatgatctttcaaacgagtttgaataataacccgctcttcaagcgatagatgtgttccttttttacgcttgtccatgatagaatgtagtgagtccattttgacctccatagatgtttttgtggttattaacattctatcaaacaggtccaaatggacttttttattttgtatcaagtgttcaatttaattttacaatcggcaaatttaaaatttttctctttctactcatattctatgataaactcattattgttataaaaataagtataaacgaggaaaaaatgcgcaaaaaaaatatttattctatttgtatcggattaccgatctttttgattcttgcattctctattatggctcatgcaagttgggttaccggctttgacaatttctttgaaggcttagtccacagtattcctaatctgcagagcattatgcatgtaattacatttttagcagatactaaagttgacttagtttggatgctgttgatagctgtcattctttggctgaaaaagcagcgtcctctttcggcaagtattgtcatttcactagttacagctgatgcttttggttggattgttaaacatataatccaacgggcacgaccaactgctcacttagctgctgatgatggcttcagttttcctagtggccacacattaggaatggcgattattgttttctggctaatactaatattgattccagctttagttaaaaataaaactgctaaaatctggctcactgttttattagctatttggcttgttttagtaatgatttcaagagtttatctctacgctcactggccaagtgatgtttgcggctcagttgctatgggcttaatgtggattggcttagtagatgcaatttgggataaagttactccacaaacagacaaaaataatttttaagattaaaaatagtcgacgataagtcggctatttattttgggcaaaaagaaaaagtcactaaggaaaatgtccttaatggcttttctacaccttcaaatttcttcctatcagcagatgtcataagaaacatcttgcttagccttttcatcctcggagcgctcatcacacgctccgctactatgatatcaaataaaaataaaaagataaagatttttacttgataaatttcaaaaaaagtatatgaattattaaaaatcaaatttgtatattgctatcatttttaaccttttttagctccgatttaactgatttgcttttagcattgttaattgtcttaaaaaaggcggaaatttggccaatttctttttcggtagtcgaacaacagccacctattattctagcaccatgttcataccactcttggcttaactttttaaaatcgaattttgcattaaatggaatccaattgcgctcaaattcgttataaacgccacccaagttaggataaatgacaatttgtttatcagtaaaatcatgaattttatcaattactgcagttgctaaaaacggtttaaagcaattggctccaatcgcaaatacttgatcatattcattaagcttttgcactacccgctttaaaggagtgccatcactaattttagttgtatcatgcaatgtaaaacttacatacactggaatttccggagcattttcctttaaccaatctaagattgctacaacttcatccaatttaggctgagtttcaagtgcgagacaatcaggtttatttgccaataaaatcttcaatcgtggtaaatgaaaattaagatattcctccgttgttagagaataatctccgcgaaattcatccccttgagctaaatatgcaccataaggtcctactgaagccgctacataattatgaattcccgttgtctttgcaaaatcatcacgggcttttttggcaatttgaactgcattagtaatcaatttagtagcctggtcttgtgtaaaaccatgtttttcaaaagctgggatatttgcttgataagtatcagtaattgccatctgggctccagccttaaaataattcatatgtacttgataaatttgagcaagattatgttctaatgcaattgctgtccaaagttcattatttgtatcaatgcctaacttctcaagagctgtagacattgcaccatctaagattaatcctcgatcacggatctgtttgagcaaattcatttttctcaccttagtataaattgagtagatagttaatatatatttaatattgcattaatcttagatctgtttcaaatattatttcttcctatgtcttattttttagctacagtttgctataaatttatttaatgctattttcatataatattaaaatagatttttgaaatcatgtaaataattggccaaatagtgtgccgttaaactttcaggcttttgctttaattctaaaggcttaccctcttggacaatccgaccaccgtttttaccaccatgtgggcctaaatcaatcatgtaatcacaattgacaattaaatttaaatcatgagtgattgtaataatggtagctccctgatctaacaacttttgcattacttggaccagaaccttcacgtcaagaggatgcaagccaatcgtaggttcatcgaaaacaaacaatgcatcattttgtttatgactaagatgagtaacaagtttaaggcgctgagcttctccacctgacaaagttggtgtatcttctcccaaatgtaagtaatccaagcctacttcttttaacaattttagctctcgttcaatcttaggcactttaacaaaaatcggtagagcctcattaacatctagatttaggacatcaacaattgacagatcatgccacttcaccttttgtacatcttgattataacgatcgccatgacaggttgaacagacttgttgcatatctggtaaaaattggatgtcaagagtcacaattcctgtaccaccacaagtaggacaagctccttgtttattattatatgaaaaccaacttgatgtataatgcttctttttagcgagtggctgactagcatataactttcgtaaattgtccataattgaagtataagttgctacagttgaccgagtacttttaccaattggagatgcatcaacacttactacatttgaaattgggctagaaaatctactaatttgttttggcaatttttcactttggctttttgctataatagcgggtactaaactatccagaatcaaactagttttaccggcacctgaaaaaccagttactgcagttaattggtttagtgggattttagtttttacatcatgtaaattaaaatattgctttacttcaaataaaatagaatcggaatttattcgagtggctggctctctggcaagtagtttagcactaccatccaaatatggtcgaattaaagaatgttgatcatgtttgattgcagtaattgaaccttgatccaaaatctgaccaccttttttacctgaacctggaccaatctcaattacctcatcagcggctttaataatgtcaacattatgatcaacaactactaatgaattgccctgagcaactaactttcgtaaaaccttaattaatcctgcaacattagcaggatggagaccaatagaaggctcatccaaaacatataaaattccagtagtttcagtacgtaatgttcttgctaattgaattcgttgcaattcacctgtcgataaggtatttccacttctagccatagtcaaatagtctagccccaagtctaataatggttgcaaattatccaaaaactcctgaataatcgaatgagccattttatgcatattagttggtaaagttgcttgcacatctttaacccaggtaactaaatcacctaactgcatttcggccacctgattaatattttgcttaccgaccagctgttgtaacaattctggtttcaaacgactaccatgacaaagtggacaagtcgaataagtaaagaattcggctattcttttttgcgcacgttccgatttgctactctttgctgaacgatagacagcttgccgagcattttcatataaggcattaaaatcatgaaataccctgccagttcctgataaaaagtccattttatatttcttttcaggaccatttaagacaaaatctttttctttatcagtaagatctttataaggaatgtcgatcctaacaccagcatgttctgcaacgttaggcataaagttccgtcctggcaagctccaagatgcaactgcaccatctttaattgacaaattttcatccgtaatcagtttagattcatctagttgccgtatcttaccagttccgccacactcagtacatgcaccatctgaattaaaagcaaattgttcggcacttggtgcataaaattttacaccacagactggacaagttaattgtcccatttgctcacctgacatactcattgcctttgcaattgccaaacttggcttcaaatggtgtccattaggacaaactggagaacccaaacgagagaaaattaagcgtaaaacattaaaagtctcactcaaggttcctactgtagctcgctcatttggtacacttggacgctgccgtaaagctaatgcggagggaatatgtttgacgctagttacatcaacctgatttccctgtttaattcgcctacgcatataagttgacagagcatcaagatagcgtcttgaaccttcttcataaagaatccccattgctagtgatgattttcctgagcccgacagtcctgaaattgctacaaatttattcaaaggaatgtcaacgtcaatattctttaagttatgtactcgtccgccacgaacttcaattttcgttggaatcgtcattaaatatcccctttccattatttagtcattatctcttttaatctataatcatgaattaccaacaagcaaaccaatttttggaaaattatgacaaaattactattaaaaatatgtgttatatgatatattataagtagataaagtaagcgcttacttttgaaagacatagaaatgaggtgttgttgtgatattgattaaagaaaccgttgttttttcttttgatagatataaaaataccacatatttagagacacccatcaagctaggagtcatgcgtaacggcgcttgattcgtgtcctaaataaaaatgagggttacattttgtaactcttatttttgttcttaaaatacaaaagaaaatcagtacaaaacacggagtttgtactgatttttaatattctaaaggttaattatttaacccaatcgcggacttcactatcatcacgtgcaacaccaacaacattcagaccattagcccattctttaaagtgactgacataagccttatggttagtgcctgctgaggtaaagaatgatgcaacttcaccacggtagtttttcatcttttcaagtaatggcttaattggagttgcaggatagcctgaccaaacagggctaccgactaaaatcaaatcataattattaaaatcgatatcatccatttgaatttcaggataaggaaccttaccttgaatttgatctagagcaatatcgttggtcttgtacatatctgaatcaaaagcgtcaggagcaacagttacttcctttaattcgctgttttcaatttctccgttaatctttttagccatgttcttggtattgccttcccaagaataatagataattaatgtttttttagccataaatttagtccttctttcatttacatttattgtaataaaaaaagaccggtttgaccaatattttaatacgcgtggtgctagttaaatcgttttagttaataactgaaaattgaaagcaccaaaatcaagctcaagtcctgtcactattgagctttcttagacgtaattagtttttatatgatctgtttcagtgcaatttgtatgaatcgtggcagttggttaataaagtcattgattacttcatctatcttttcaaaactattctgtttaagctcttttaattctgaaattaagtagaccaatgcatctacgaatctaatatcaggtaaggattcgttcattagatagaataaatctccgattgtcttatcatctgtattttgtctttcctgccaggtcaatagatcataagttattgctgtaactgcgatatagccacattggccatcatagctttgaacttgagatttatctaaagcaagatattgcttagacgtcttaaaatatgtttcaatttgccatctacgaccataaagttggatgatttcttcagggctaagctttgtctgagtagtagctaaaaccaaatacttgttcttgtttccacggttggagacaaagacgagctttaataaaaagctatgtccatgatattgagcctcaactatgcttgaataaagataatgtttctttttacggatgtttgaagcagccaaacgatcatacaagtctttaacgctatagcggcgatggcgataaatgtaataaatctttgaactcttcttgatcatgccaagtccatctaaaccgatcttctttaaaatccaaaacattcttggagaagaaaaccaagaatcgaataagacgtatttagcttctactcctaatcgtaaggcttgtctaatcaactctacagttacatcattcatctttctctgagcttgatttctccttttaccagaaattgaacgttcatcagcagtaatgggagcagctccaatcatatttttcttggttttggttgacatcaaggcaaagttaaccggcaagaaggtattgccatcgctccagcctaaagttaaaccacgatatccgttcaaatactcatgcttgtcatggtcatagactttagctagcaattcggtctttttagaaaaagaccgagccatcagcgtatcgtcaacgataaaagcaagtcggcgtcttttatcgataaatggttttaagcagccaatgagccgggctgcaatcaagcataatagtttttgccagttgattcttccatcgttaagtacattgcgagcagttctaacggaaaaacgtttgtcatccttagctctgaataaagaaagccgagcaaaatgtactgacatcagccaagagataatcatggttaatgaaacggtggatttacgcttaaaattgacttgtttagttaacttagctagaccaattagattaataaatgaagaaattaaggatttagtatcattttctgtgtcgatttgttctatactgttcattgcgcaggatctcctttactttttaggtcgacacttaaagtataacgcagagagatcctgcgtttttatttttgataagaaaaagccaagaggcgcggggaaggagcgttaatcttagctttcaagttttagttaataaaaaagtccaatcttgttagactcaacttgtataataatagaaaagagcctgatctgattgaactgccttaagcttaagcgttttagccaccatttacaagttagttttaaagatttagtgataatttgtcggcactggtatcgtttgtatgcaccggctgagtttactcatcggcgaaatattgatcaaattaaaactacggacagtctgattttggctttacttatctggcaagctaagacaggaattgaatcacaaagaagattctgtgaatgtttcaattgtttatcacactcacgttttaatcggcgttcacgtcagctattgcaattgatttatcagatacggcaagaaatgaataaaaaggttgacctgaatggacatttcttgatcattgacagctttccggtacctgtttgccaaccaattcgcaactatcgtgctaaaatttttcgcggttatgccaacattggttataaggccaccaagaaaatttacttctatggtttcaaagttcatgccattgttagcgatgacggttccattcttgattatgtcgtaacaaaagcatcagttcatgatgccaaggagacagttgaactgctggaaaatgcccatccatctaattactatcttcttggcgacgaaggctatttaggcaaagaactgcatcaacagctaaaacaaatgggttatgaactttggacaccatatcgtaaaaatatgacaggagctaaaaagcacaatgatcatcaattgatggctattcgcagaacaattgaaagcgacttttcgcttctgatctattacaatgccgagaacaatcgagcacgtagtctgataggctttcaaagccggttggaaattgcaattttagcttataatttggcttattgtctagaacgatttaactagcaccacgcgtattttaatattattattttagctattttccttttcttttgattatttccatcatagcctgaccatactttttcatcttcgcttgccctacaccacttacctctaaaaattcactttcattttgtggtttaatttgtgccatatcgtgcaaagagcgatctgaaaaaatcataaatgctggtactttttgctgcttagctaattccaaacgcttttgtcttaaagcttcaaataaagtatcactttcttcaccagcatgagtagtagttactgaaatcttagcaattcgccgtttgactacagttttgccatctagtacatcccacccatgattagttacatgcactagtggatatttgctaccttcaacttctagataacctgaagcaattaaatagtcaatcaagcttatagcatctttttgcttcattcttagagagccaaaagacttatattgtgtagcattcatttcttgcatgcgatgattttttgagccaatcaaacattgagcaactatcgtttttccaaagcgaccatctagttcataaaccatactaatcactttttgagcatcaatggtaatgtcagtcaatttatcctgatttagacaatttgaacatttaccacatggcggacaatcttgaccaaaataacggacgataaattgctgcaaacattcaccagtattagcataatcagtaattgtttgcaacttacgatattgcagttctcgatatttatcatccgcatctgattcatcaataaagtagcgatattgacgcaagtcaccaggatgatagattaaaatcgctttgctttcttccccatcacggcctgcccgacctgcttcttgatagtaactttccatattacgggcacttgaggcatgaatcacaaatctgacattacttttatcgatccccattccaaaagcattagttgctacaattacttgaaattcatcaaattgaaaagcttcttgtacttgacttcgttctgaagaatccattccaccatgataagcaccaacagagattcctttcttagccaaataatctgtcaaactttcaacttttttacgtgtattagtgtaaataatccccgctttatcctgatgtgccttaatatattctgaaatatataatggagtattttgtggtgagttgaccactttaaacgatatattagggcgagcaaaagaggtaacaatcatattctccttgggaatattcaattgttcacaaatatcatcttgaaccgcaggcgtggctgtcgctgttaaagctaatatatttggtctgctttttagtgaattgattccatctaataattgacgataagcaggtcgaaaatcatgtccccattgtgaaatacagtgtgcttcatcgacagcaactagatcaatatctaaaaaatttaactgatatctaaaataatcaatcgctaaacgctcaggtgtaatataaattaacttaattttgccttcatatgcctgacgtaaaattggattaacctcttcttgcggtgtagtagaatttaatgctgccgcattaattccattttgctttaaattatcaatttgatctttcattaaagaaattaatggtgaaataaccaaagttacaccggaattaatcaaagctggtatttgataacacattgattttccgccaccggttggcataaccgctaacacattttgcttttttaaaactaaatcaattacttgtttttgacctgggcgaaaatttgtatagccaaatgtatcttttaaaacttcttctggattcataaacttatcctaactagttaaattgctactttttattctaaattaacaattcaccccaaacaagataaaaagattcacacttttaaataaagaaaaatgtgaatcttttagagttaaatttacttataaaatgtttcttctactgcatgagtaatcgcaatcttatcatgagcataggacaaaccgccctgaatataaagcatgtatggttcacgtaaagggccatcagaagaaagctcaattgttgatccttcaacgaaacttcccgaagccataacaacttcatcttcgtaaccatcctgatgatatggaattgggtcaacaaatgaattcattggtgaatagtgttgaatagccgcacagaattttaccatcggatcaggtttaccaaaagtgacagtttgaacaatatcactacgtggatcactccatttaggtgaaacctgcatccccatttcttctaataaggctgcagtaaagaccatacctttttgagcttcaccagtagtatgagctgccataaagaatccttggtagatatcgcgcaaataaccccaagttgcgccttcaccttttccagctcctggcactgtcaaccgtgaaccagcaccatcaattaaatcctgccggccaactaaaaaagcaccgccttttactaaacctgcaccagcattcttataaagggaaccagccatcatatcagcaccataaaaagttggttcttcacattcagagaattctccataacaattatcaataaaaatattaacatctggacgaacttctttaatgaacttaagcattggcttaatcttagccatagtaaaagtcttacgagttgcataacctaatgatctttgaattgccactactttaattgaaggatccatgatatcttttttagcttggtcgtagtctacttccccattcttcaattcagtagtcttaaaattaattccccattccttcatgttaccgggcttattaccagcaagaccaattacttcttgaatggtatcatatggcgttccagttaaataataaagggtatcccctgggcgaagcatgctgaaaagaccaactgtaattgcatgagtacctgagccaaattgtggacgaactagagcatcatctgttttaaaataatcggcataaatatcctcaattttatcacgacctatatcgtcataaccatagcctgttgatggaactagatcttcttcaccaacatgatgttttctaaataggtccaatacacgttgttgattatacaaaacctgttcatcaattttttctaaacgaggttggatcattttttcaactttagtcactttatcgtttaactcttttggtaaattctctttccaagaaaaactcatttttaactccctatttatttttgattacttctgcttgtacgcataaactaccattattattttcgctcagatatactccctgaatctctggcacaaaaccaggaaacttttcaatagcatgcgccaagacttcaaagtacttttgatctaccgttccccacttttcaccgggtgcaacaatgaaaacacctggaggatatggcaaagctccttcggcagcaattcttccaacaacattttctaggttgaccagttcattttgatcttttttaaaaagctgatcagctgtagctggtgtcatttgatagtcttgcatccctgatttagaaaatagcttttgctgtaatacaaaagtattattttcctgatagtactcatgcatctcttgacacaactgtttcagggtatagccttgataacgctttggatactcattatataaaaccggcaaaacatctttcattaagtcatcttctagatagtgtttttcaaaacttaaaaaagcttcaagtaaagtatctagttctgcttgactatctcccggtgtaagtaaaaacaacaatgaattcaaatcatttttagctcgaataatatgattttccattaagtattctgccactaccgcgcctggaatacctgttttctcatattttgcatttttaacatcaatcccgggagtttttaccgtaatcttcaatgggtcaatcattgcttcgcctggaaccattttacggaaaccgtgccaatccgtattttgtcccatttcccaatattctgcattggtagccaattcatcagtcgaaatttcggcaaaattgtcaggaactaatggcttaaatagcttagactttttgagtagttttttccgccattcaattcccattcgcagagtttgatcccaccactttttatttcctgctccagcagtaacgtaggaattaactgttaatgaagcataaagtgggtatgcataactggaagtaacaaacttcagataagcatgattaaagtgcttatgatcaacatatcgtttttgtcctttaatatgagcatccttttttagaatctgtgacgcttgagccatacctgcttgctgtttatgtaatgactgagtaaccaaaatacctggatcatcaggacccaagttaagtagaagtggtgataaatgtctcataattggcacgaattcttcaaagccgccccaggcacagtcaaacagaacataatcacaaagtttaccgattcggtcaataatccactgtgcatcataaaagactccatcataggtttctgcttgtacgattgttaacctaaatggacgcttagcctttgcctttgccggatctatcttagctacttcagctctaattttatcttcagttaagaaggctggatccatttctccaattagtccaagtgcatttcgatcagttggaatgtagaccggctttgctccgctcattaccaaggcagaattatacaaagatttatgattatttcgatcaaataaaactagatcgccttcagataaaagtgcacttgcgcaaatagaattagctgaagtcgttccgttggtacagaagtaaaccttatctgcatgataagttttagcagctttcttttctgcattaagtggcgttccagcatgcgtcattgtatcccctaattgaggaacagtatcacttgtatcggcaaacattagatttttaccaaagaacttattaaaaactactccggcaggatgtttgtcataatattgcccattatggtgacccggtgtagtaaatgaaattggttttgcttgagcaaaattgatcaagtcggtcaaaaagcctggcaccatttgcttttcatattctgtagctttctgagtgacttggtcttcatctacctgatcagttactttaatcaatggaatcggaaagccagattgttctcttagagcttctgcttgttttattcctaatgcatcatcatttttgacaacaattgcggcaagttcagcactattttgtacatcgccaattggaattgacgaccaacctttcatcttattaacattgacgccatttccaatggcaattttcaaaaaatccatcctttttctttccattttgtccacgaaaccgttttacatattgcaaaactttaaaaagtctttataatttttctacagtatagcgtactttttgcattctttcttaaaatacgctacagctgaaattattatataaatattggaggtttttaacaagtgcatttgccttgctcgcctccgagaacagctatgtcaacacaacaataaaatagcttaacttggaggaatttttatgtcagaaacaatcgaaacagtcaatttcgaacccggcaaaaaacactacatgtcatggccggttattgcattgatcgacttcgtaacgattatcagttttgaaaatattttttatccatttcaaaatcaaggcttatcagtagttgtatcttggattttcctactcttcgcctacgttattccttatgcattgatgtctagtcaaatgggcctaacctttactgatcaagccggtggattggcatcttgggtacgtcattcatctaacgatacactgggctactggacttcatggatgtattgggttcaaactgttccttatttggtcgatgtttctaattcagttattgtgtccttttcatggattattttgggcaacaatactttagacaagcatatgtctactttttggtttgggattttgacctttgtcattattcttgcctttattttggttgaaaatgcaatcaagaattcacttgaactactatctttaattggtggtggtgcaatgtttattatgtctatgctctttgttttacttgctgtttggtcagttatgcatggacaccatattgctacccaaccatttaacttggccgcatttaagccatcatttagtttacgttacttttctaccactggtcttctaatcttcgccatgtctggtgcagaacttgctgctccttatatcgtacaaatgcgcgatccaaaacacgaatttcctaaagcaatgtggatgttggctttgatgactggattcttgactatcttcggtactttggctttagcaatgtttttcaatgctcatcatattccacatgatttcaagatgaacggaccttactatgcatttcaactactaggcgaaagccttggttggggcaaagtattaatgtacatctttgctgttgttcaagccctctttatgatggcccaattagcagttttacttgatgcatcaagtcgtgtctttgccggtgacgttgccgacaaattcatgccaaaatggttaactgggaaaaaagacaaaacaggtcgtccagttcactcgtacactttaacttgtggtttagccttattcttgcttttacttactgggactttgccaaatattaattcaatttacaattggcttttaaatatcaatggtattatttccccatacaagacttgttgggtattcttcgctttcattatgttacggatgcaccaagagaagttccactcagattatgtcttcattaaaaataagactggtgcccttatcatgggctggtggtgcttaatctttacctttatctgtgctactttaggatttattcctcaagaagcagaagcaacattcggtagcgcagcctttaatcaccaattaattatgaatattattacagttatcgtactctttggcttaggcttcttactaccatacttaagaaaacgcgaagaacgtaaagaaatgaatatataaaataaacatgcttcgatcagttcgaaaatcgaggcatgtttattttattattctaagatttcaacctgcatcttactaggaacattaacaaagtcgaattgtttttgaaaaacatgatcaaaccgtaaatcataaacagaaccaataattggtgttaatgcaaaagctcgtaaagtgttcatatctttagttttattagcataaatatgatgcattggtggtttgattttataaattcgttctaaatattgtggacttacctcatcaacatagccttctagagtgaaaccaatgctagtgagagtttctcttccgcgcaaagcggtaattgaaactttattgtgtcccttaatatggcgataaaatgacttctgattagtcgttgcaaaaatcagacgaccatcttcattaaagtcaatatcgataatattggtatgtggatcaccattttgatcaacggtaccaaaaattactgaatggaaacaatcaacgattagatctaggaattcgtcgttacttaaattgcgatcgagttcaggaacatgttgtctcataataatctttccgtttctatatactttctgtaatttttatctatattatttcttatagtgtacatgacacgattaactaaaaacaactttaatgctcattattttcccattttaaatgtataattgtttaatattaatttttctggtaaaatttcagctaacaaaaaataagaaaagaggcagaatatgaatttagactataagaaattggcccaagccaaaaaggacgacattcttcgtgatcttgacgaattaatcgcaatcgactcatctgaggatttgaataatacttccgaagagtatcctgttggtccaggtccagttaaagcaatgaagaaattcttatcgtttgcacagcgtgatggtttccatatcaaaaatgttgacaagtacgctggccgtgtcgactatggtactggtgaaaaacgtttaggcattattggccacatggacgtggttccagctggtgacggctgggtaactgatccttttaaaatgttaattaaggatggtaaaatcattggtcgaggttctgccgatgataaaggtcctgccctagctgcatattatggcatgcttttacttaaagaagctggatttgaacctaagaaaaagattgattttattgtgggaaccaatgaggaaactaattgggttggcattgattactacctaaaacatgagccaacccctgatcaagtattctcacctgatgccgaatttccaattatcaacggtgaacaagggatctataccctgaccatgacctttaaagatgacaataaaaagggatcagtaatccttaagtcattcaaggccggcattgccgaaaacgtaactcctcaaaaggcctatgcaactattgttggtagtgatttagccacaatgaaggaaaaatatactaagtttttatcagataataaacttgaaggcgaattcactattgagggcgatgaagctaagattgaattaactggtcaaggtgcccatgcatctgcacctcaagttggtagaaatgcggctacatttttggcagtatttctagatcaatttgattttgctggtcgcgataaaagctggcttcatttcttagccgatgttgaacatgaagactttaacggcaaaaaattaggcgttgctcatcatgatgacttgatgggtgatctctcaagtgctccatcaatgtttgactacgaggaaaatggaaatgctgttttgaaagataatattcgctatcctcaaggtactgatccagataagatggttaatcaagttgaagaaaaatttggtgatatcttaattccaagttttgcttcatttgaagaacctcattatgtacctggagacgatccattagttcaaaccttgctcaaagtttatgaacgccagactggtaataaaggtcatgaagtcgtgatcggcggtgggacttatgggcgtttatttaagcatggagttgcatatggcgctcaacctgaagatgctccaatggttatgcaccaagcaaatgaatatatgaaggtagatgacctaattaattcaattgcgatttatgccgaagctatctatgaattgactaaggacgccgaataaaaatttttacatgtatcaaaaaagcttatatactgatcttgttttaatgcagtatataagctatagaaagttgctagtgtcatatatcactagtgacttttttatttttccaataaaacttcttcattatttttcttagattttagccaaaaatgatgtcccaagtaacaaatagctacaaaaggaattgtatagtacaatgctactctttgggttggatcgaaccagattaatacacaagaaagcaggcttgatataaatgcaaaatatggaattacaggataccatggggtcttgtacttcaattcactgagttgatgacctgagtttaaaaatgcccttctaaacttcaattctgaccatgcaatcgccgtccaaacgaatacaacagctaatccagaaatagaaactaatactagataaaccgtcgaggcagcaactttactagaaatcaaagcaaaaattccgtctaacatacttactactaatgacaatactggaataccacgcttattagttttggtgaatgctttaggaattgttccttcgttgcccaacgaccaaagcattttagttgaagcatacaaacctgaattggccgcagaaataattgcagtcaaaactacgaagttcataatatttgcagcaaatggcacatgaattaggtcaagcacatacacaaatgggctttgagttactccagccgtatgataaggaattaatgcggccataactacaattgagccaataaagaagataattaaacgccaaagtgttgtcctgattgcttcaggaatagctttctgaggattctctgcttcaccagccgtaatgccaataagctcagttcctgaaaaagcaaagtttactgttagcattgttgtaaatactccaccccagccgttggggaaccagccatttttataaaaattaaccaatcccaatgtgcttgataaactttgctcaactgatcaatcaaagctgttgcggtccataatttattattagtatctacgccttgtttttccaattcatacgacattgcaccatctaggactaatcccctatttttaatctgttcaagcaaacccatttttttcatgctgtcaacattattttagtaaatttcctaaataatagccgcaataaactagaaccaagccacccagatatgatgacactgcgtagaatacaagaccacgataatttttactcttataaagctcaactaattctgtattcatagtggaaaaggttgtatagccacccattactccagttcctagtaatgcataaataaaagtgttagcaccaattccaaaaatcaagcctaaaattagtactccagttaagttaataaacaaagtcggtgtaggtaaattagaaaatttattaccaatccattcccaatgctttttaccataattagtaatagcataacgaagcatagctccaattgatgcaccaattcctgcaagcaaaaaattcatcgtgtattcctttcctttcttactaattgaccaacttttttaccaattttcattcctaacatagcaaaaaaaaagccaaaaataattgagctaaagtaataaattactgcttcgattggcaaattagcctgcatattttttaaaacatcaagattaaaagttgaaaaagtagtaaatgcacctacaaagccagtacctaatccaactacaagccactgcctaatctctttagtttcaataaaaaagtaggtgaaaaacgctaataaaaagcaacctatgacattaccccaaaaagtaccataatagctgaagtttgcatttaaaccagcacgtgccataccaccaaaaaaggcgaaaatagcgatactaatgtaattaataaattttgaattcaaacagattcctcccacaaaaaaacgtctactttacccctatcggataaagtagacgtcattagattttactcggttaatggcgaacgtcatcgcctattcagttgacagttatcatcatacgacttttctgtttggttggcaagttgtattgtgtgcgtgtcgcaaagcgacacgcagtttgattatttaataaaaaaatttagtaacaacgtgcttgaaataatgtataattatttttaacgaatgtttgaaaggagcctcaatcttgacttttccatatgaagataaatttcgcatttactgtaaacaacaaaagaaactagccgattcaactatttctctagcctgttcttcaatttcaactttttgggattattattctggtagtttagatgctactgaagcaaatgtagaaaatgttacaactggagatatacgtaactttttagattcacttgaaaataaactccatatgaaaagtaatacagtaaataaatatcttagtcacataaagatgtattttgtttttttgaatgaatatggctacatcattacttatccattgctcactttacgtggtaatcgcttcaatcgtaagcaacactatgttattggctgggaaaatcatttatcagaattaattcaaataaaaaatattcatcctgaaactatcaagatgatggctgctattgcttgtggttttaagccaaaagaaattatgattttgcatgtaaatgaattgttggtaaaagttaaagaaaatgatgtcagagaatatatccaaaatcacactaattttgccaataacgataatccctatctgtttgctcgccgcgatggcaaacattacgcttctgattttaatattaacccaaaaattgcccctgaccgttcaatagtcggcatgccattaactacacataagcttcggatgtcttatgtctactctgttttgtctaattcaaaattaagagaagcggattatattgaaaaattacatctttcaatgaaaactttaaattactatcgtaaaaatatgacactctatgtagaaaccagtaaatttgaattaaaaaaataaacaagcaaaaacgactgcccattttgatatagtcctactttagtagacagtacaaatatataaaattgtactatctatgaaagcaggactttttgtatgtctagaaaaagtaaatttagctatgaagctaagcttaaagcagttaaacaatacataagtggcgaagcatcacctgcttcaattgcgaaagttttaggggctggcaagactacactgcgccaatgggtatatgcatttaaagatcatgggccagaagcattaagaccacataaatataatcaaagatacagtaaagattttaaactcaaatgcatagctgcctatttaaatggcgaaggctcatatgattatctaacaaataagtttggtttgcgaagtgctgcacagttaaagcagtgggttatcaagtataatagtcatcaagaactcaaggactacaatcctattctggaggcttatatgactaagagaaaaaagacaaccctagaagaacgtaaacagatagtgaaatactgcaaggatcatcaatggaactacaaggaagcagctcttaaatttggctgcagctatgcccaagtatacaactggtcaaaaaaatacagcgcaaagggaactgacggcttagcagataggcgcggtcatcgtttaaaagaagctgagctatctgaaactcaaaggctaaagcgtgaaattgaacagcttaaaaaagaaaatgatattaaagaccaagagatagccttcctaaaaaaagtgaaggaattagaaaggatgtgtttgctggacagccaaaacaaagacaaatagcacttaaacaacagcagcgaaattctctttacagtttgatcaaagaatgtcaccgagaatataagtggtcaattgaatggatgtgcaaacaagccaatattgcccggtcagcctactacaaatggcttaatcataagccaagcaaacgtgaactaagagatcaaaagattcttaagcgtattaaagaaatagctgagagcaataacagcctctttggttctcctaagatgactttggctttaaacaatgagctagcagacggtgaggccaaaatataccgtagaactgtggctcacttgatgtgcgtgaatggcatctatactagcaaggccagatttaataagaggtatcgctatcaagctgctagaccggaagaaactgccgaaaatctattgcatagagacttcaatgccactaaacccaatgaaaaatggtgcactgacattactgaagaaaaaattcctggaacaagtcaaaagatttatctctgtactatctttgatctatatgatcgtttccctgttggctatgctttaagcaagcgcaatgatacagccctagttaacgctgctctgtcaactgcttggaaaagagagcccaatagtcatgcaatgcttcatagtgatcgaggatttcaatttaccaggatgccttttaagcatgagctagaagaacatggcatgccacaatcaatgtctagaattggccgctgtattgataatggcccaatggaaggctggcaaggtttaattaaagaaatgcgagaagttctttatccgaaggcaaatagctatgaagagatggaaaaagcctttaaagcaagtattgaatactatattaattatgatcctcaggagcgcttcaatggcaagagcgcaggtcaggttagaaaagaagctaagaataatccagagaatataatttcatatccaataaaacaagataaaagatataaagacttttggaaaaagattgatgaaaagaaaaatcagctcgcacaatagcgaactgattaatcaaattaatttatatatttaagctgtctacttgacacggtacggatcatttcgagtagtcgtctttgtttgttgaaggtgaaatttcaacaaatctatcttagtcagaacttggagttatctattagtaccagccatttgcttgccagaaacttttagcagcgctccaagagccatatctagatttgacataattatccgctacacgttcttggttagcagctgaataatcaccattcaaataagatgaagaaagttgatacttacctacatattggccatttctagcactgtatgagccaccagattctttgcttgcaatccatgcctttgcactagcttcggaacctgtcgcggttgatgaatatgaactagttgttgtcgtcttaggtgtgtagttcacatttgaataagtgtatgaactttgactttggctagcttgtgtagtttgttgagctggcgtttgtgtttgagtgtaggtattttcttgtctagcttgagtattttagctagtagtataattagttgccaatacccattgatttaagccaagatcataccacttctgtccctttgaatcataagcagtttttataatcttccagttagtacctgcagctagagtttgaccagttgcaactggattttcatagttattgtaaacggtagtagcttgtgtagttgtatacactgctgcatcattttgcacaacggcagcttgtgcttcattattatctagttgattgattgcaccaatacctgcaagtgataaagcagcaacagcaatagtcttagttaaaatagatttagttttcaaaaaacatctctccttaaattaaaacgtcaattactattcatcatttttgttttattattctcttgcaattgacattttatataatacctgcttcgagttgcagttccatcacagtcagatcacacaatgattaaagaaaaatgttttttcgtaacagttggaaatatttttaataaatctagatttctctgcaatatttgtaaaaatcatgcaatatatgaacaaaatttgacgacaaaataagcatccctacgccataaaagatcgttttagggatgcttatttaattaataatctaattcttgatccatacttgcaggccagccaccaataccacgtttttgatcaaggccacgcaatgtctccatctcttcagcagtaaattcaaaatcaaaaatatccaaattatccttcatgtgtaacggattcgtcgagccaggaataatcatgatattttcttgtaccaagaagtgtaacgcaatttgtggcactgtcttattatacttctcagccaaagaaagtaaggttgggtcattaaataaagccttcattccttcaccgagtggtgaccaagattcatgtacaatattattttcaattaaatatttatgcattttcttttgttgcttaaagacagacgtttcaatttgatcaactactggcttagtatcgaaattattcataatttcatttacttgatcatggttgaagttactcagtccaattgaacgtagctttcccgcctgatatgcctcctcaagtgcctggtaagtacctaaactatcagacataggccagtgaataatcattaaatcaaaatagtcttgctgggcgtgaattaacgattcatcaatcccattcttcgtctctctataaccacttgtttgcgctttagtggtcaaaaaaatgtcttcacgtttaatgccgcttttgttaatagcattgcctacttctgcttcattactgtatgcttgagcagtatcaattaaccgatatccagccttcaaagcctcgacaaccgctccttcagtaattctaggctgaattctatatgttccaaagccgaagattggagtttttacaccgttattaaaagttaaatatttcatttttattcctcaatattttattcaggatcagatgcagagtgataagtaatactaaatccagcttgatattccttacctggctccaaatgattcataccatatttgtgctctagctcaccatcagcatcttctctatctgcaattccccaccatggctcaatgcatacataattagcggtatttggatattgtgaccaaatgccaacatatggtgcatttctagtccaaacattgatgtggaacttactcttatcagttctcaaagatactttattgtcatgaccatgtaattcataaatcaaggcatcatctttaaatagctcatcacttaaaccaataaaactatcagtcgaagctagagaacgattattccagtcaagatatgctcctttaagtgggatttttaccctagcaatagatggatgcatatcgaaataataatcttctttctcttccccattatttactggtaagttaaatccagggtgaccacctacaccaaaaatcatagtttcatctgatttattaactacgctaaagttttcttccaataaattattcatcaaattatagttaactctgaattcaaatttaaatggatacatttcacgcgttttttcattatctttcagtaagaacgtgatactttcttgtgtatgattctccacttcaaaatcacaatcacgggcaaaaccatgctgacccatatgataggtcttaccttgatacttatattcatcattcttaagtcgccctacaattggaaaaagtacaggtgcatgtctgccccagatctctggatcagcttgccacatatattcttcaccggtatgagctcctttaacgctctgaacttcagctccgtgatccgaaatcactacttcgatcatattattcttgattgtgtaatccataactaaatttccctctacatatcaaacagttaaaaatcataatgtaatcgcttaattacttatattttaacattaatgcgtcaataagccagaataaaaacaaaagaaacatactaacctagtgttggatcatgaatcgacggattcacgatctggcactttttattttgtctaaaatagaaagtgaagataaagcaaatcaagtcttcagctttttagacacttgatgtcgtaaaagaaacggactgctttaccacctattcttaagtctcttcgaagtctgtgggcacttagatgccgtgtttagaaaattagaattaataggttgataaagaggtttatcttcacagcggaggttatattatggaatcacaaattattttcggtattgatgttagcagtaaatcttccacagtttgtgtggttaatgaccggatcaaacaaggcgaatcttttagaatctctaatgattcctttggctatcaaaaactttatgagcaactgaaccaatatttgataactcctttagttgttttcgaagctactggtgtttattctctaagcctgcaagctttcttagaggattatcatattaagtatttgaagcttaatccgcttaaagcgaaaaagctaatggacaataatttacgccataataaaactgataaggtagatgcttatcgcctggctttaattcaatttaatgccccgcaaaagctgcgtgatccacagcccagagagtatcatgaacttcagaatgccagtcgctattatgaagaacttactaggagtatagttactactaaaaatcaattgcaccgcaacctccaatccactttcccacaaattgaagaaatactgtctcatccatctggcagaatttattgggcgcttgttagtcttttcccacatgctggatatgttctagaaaagaatgagacacaggtaactcaaatgcttaattctatttctggaataggacaacaaagggcacggtacttaaccacaagattatacgcttttgctagagaagcttatccttatgattccaaagatagtattatcgttagagctattcaaaggaacatttctaatttgttttcactccagcaagaacgcgactatgtaattaactacatggaaaagctggctaaagcagtaaacgctcgtgctttatccatctatttgagtatcccaggggttgctagaattacagcagtgagattagtagcagagctcggtgatctaagacggtttagcacttcagctcaaattgatgcgtttgttggcattgatccaggaaggtaccaatctggtgaaaaagacagttctcttggcattaccaagcatggcaatcatattgccagaaaaatactttatcgagttattattcaaatggagacggtaaaggctacgcagccttgccatataactgattattatgacaagaaaaaacgatcttcaaatagccaaggctataagaaaatcgccattgcatcagtccataaactgatacgcacaatgtttgctcttatcaaacatgatcaattatatgattacaacatagccaccaaaaataaaagactttagctgaaatcaaataatcaacttaagtataagcaacctatggaaaaactacaagtattcataggcttatttgtggtactttcgctttttcttaaatttaaactcttatttgctttaaccttattcgcatcattaaaacaagtaaatttattttcttaaatcattgataatacttgactttgggtagaaaaaaagcattcaaactttgaattgaatgcttcattcgtgattctttgatcaattagagaataaatttagttaagtctttattcataataatatcgcctaacttatcttcaacataggcttcagtaactgtgatttcacccatttccatatcaggcccttcgtaaagaacgtcttctaagagcttttcaagaatagttgaaagtcgacgagcaccaatattatcagtgccttggttaacatcaaaggcaatctccgcaattttatcaacggcttcttgggtgaaaactaacttaatgccatctgccttcattaaagcaatgtattgcttaagcaatgaattttgtggatccttcaagatcttgacaaaatcgtccttggttaaagcgttaagttcaacccgaattggaaaacgtccttgaagttctggaatcaaatcactaggcttactttcagcaaaggcacctgcagcaataaacaaaatatgatcagttgaaactgggccatattttgtatttacagttgagccttcaacgattggtaaaatatctctttgaacaccttcacgagaaacttcaccagaattacgtttattaccagcaataattttatcaatttcatcaataaagataattccgttattctggcttctttcaatagcatgttgatagatagcgtcatagtcaactaacttacgtgattcttcttgaatcaaaacttcacgtgcttcttttactgataaagtacgcttaacctttttcttaggcataagatcactaagcattgagcccatatccatccccatttgacccatcatgtcactcattgggttggccttaggagcttgttctacctctatggtaacttcgtgatcttcaagtaagcctttagctagcttttcagccacatccattcgtttgtttcttacatcagcagaaacatcctcttcatgatcttcttcgcgattattttctcccatcaacatagacatcatatcttgcatttgctgcatttgattttcacgacgttcatgtttctctgctggagctaacaaacgaactaattctttatttgcttctttagttgcttgagtctttacacgagcaaattgctccttttcttccattcgtacggcttcggaaaccaagtcacggaccattgattcaacgtcacgtcctacataacctacttcagtaaacttcgttgcctctactttaacaaagggagcttctacaatatcagctaaacgacgagcaatttcagttttacctacaccagtaggaccagccattaataaattcttaggcgttacttcacgttgcatttctttagataactgcattctacggtaacggttgtaaagagctatcgcaactgattttttagcttcatcttggccaataatatattcgtttaaaattttaactatttcttttggggtcttaatagccatttccttcactcctaaatttcatcagtgacaattttatcatcagtgaaaacatcaattcctgaagcaatctttacagcttcatgtgcaatttcatcggccttcatatcttttgcgtgtcgagtcatggcaatcgctgcggcttgagcaaaattaccacctgaaccaattgcaactacgttttcatcaggttcaagtacttcaccattacctgaaattaaaagtaggtctttgtcatcaaaagcaatcaacattgcatttaatttttgtagagttggatccttacgccatgcttgagccatttccacggcagcacgacgaagatcgcctgagtagctttcgagcttgccctcaagcatatcttgaaggctgactgcatcagctacaccaccggcaaaaccaattactacacgatcatggtaaatacgacgaatcttacgcgctgttgccttggcaataactttttcgcctaaggttacttgtccatcaccggcaattgctgtttttccattaaatcttactgaacaaattgttgtcatgttaaacctcaactttctttattacgaggaaaatatttttgataatctgattttaaatgagccattgttacatgagtatagatttgcgttgctgatagactactgtgtcctaataactcttggacacttcgcaaatctgctccattattaagcatcgcggtagcaaagctatgtcgcaactcatgtgggtgtactttaccactaattcctgcctgattaaaagttttttgcattacagtttcaattccgcggctagtaatgccagttccttgattatttaaaaatacatgctgttcatcatcatttttaagtaataatggacgtgcattttctaaataagcaatcaaagatttttttgttttatcatcaaaagcaacatagcggtctttatttcctttaccgtgaaccaaaattgtctgtaagtctaaatcaagttgattcaaagtaagattactaacctcacttacccgcatccctgtcgcataaaacagttcaaacattgccaaatttctcatcgtcaaaggcttatttcctttcaatgaatcaaaaacctgctttaattcaggctggtaaaaaaattgcggtaattttttctcaccacggcgtaaagtaataccctgagttggatcgattgccactagtttgcggcgggttaaaaagtggtaaaaagaatgcaggctggacatcttgcgcaactgactactacgggctaacttgcgttctgctaaatgttgtagataaacctggatatcacgttctcttactttagtccaacctgggaatccaccattttcatgccaaaacctttccgcttcatgcaaatctgtttgataagctaaaacggttttcgcactataatgacgctcattttgtaaatatgataaaaattgatctaactcactttgcctttggttcattaatctaaaacttccgtcttaaattcatctaaactagcaagaccacgttcactgaccttctcatggcgctcacgcttcttgcgaatcttcttaccctctagtggaggtagcaaagcaaaactagcattcattggttggaaatgtttagcactcgtagtagttatgtagttagccattgagcctaacgcagtatcttttgggaaagccacagtatctttccccatagcttcacgtgctgcattaattcctgctactaagccactacctgcactttctacatagccttcaacacctgtcatctggcctgcaaaaaataatccaggctgctcttttgcctcgtaagaagctgtcaaaacttctggtgaagccatataagtattacgatgcattttaccataacgaacgaaacgtgcattttctaagcctgggatcattgaaaatactcgtttttgttcaccaaatttcaaatgagtttggaaaccaacaatattatacattgaagctgcagcattatcttggcgcaactgtacaactgcataaggagttttgcctgtatgtggatcttctaatcctactggtttaagtggaccaaaaagcattgttttagccccacgcgctgccattacttcaattggcatacacccctcaaaaacatcgctattttcaaaaccatgtaattgcgcagtttcagcgttaattaattcctgactaaacttttcatattgctctttagtcataggacaattcaaatatgcagcttcaccacgatcataacgcgactttttataaacaattttcatatcaatcgagtcagcggccacaatcggagctgctgcatcaaagaaatgtaaactatcagttccagaaaatttttgaatctgtccagctaaagcatcactagttaacggaccagttgcaataattgtaatcccatctttcggaatttcagtaacttcttcttcgtgaacagttacattctctaacccacgcaaagtgtcagttacgtatttactgaaactatcacgatcaacggctaatgctccacctgcaggcacttgagttttgtcggcagctttcatgatcaatgaatctaaatgacgcatttcttcttttaaaagacctacagcattagataattgatttgatctcattgaattggtacaaaccagttccgcaaattcaccagtttcatgagctggagtctccttttttggtcgcatttcataaaggtcaacatgaataccacgcttagctaattgccaagttgcttcactaccagcaagacctgcaccaataactgttacattttttggcatttactcacctatattttctatgttaattgtttttttcgttttcactgtcttcacgataatcaccgttaggacaaagaatcactggaccttttttagaatgcttttctactaaaaagtggccatcatttggacaatttctgccaattggcttgtcccatgagacaaagtcgcattctggataacgagaacagccgtagaatttacgatttctacgtgatttcttttcgacaacctgacctttgccacattttggacaaactacaccgatttctttaatgattggcttagtattacgacaatctgggaaacgagaacaagcatagaacttgccatagcgtcccatcttaatcaccattggtgcaccacaaatatcacaattaaagccagctggttcatccttgatttgtaccttttcgatttcactatcagccttatttaattctttcttaaacggttgatagtattcgtcaacaacatgaacccaatcctttttaccatcttcgacttcatccaattcattttcaagtcgggcggtgtaatcaacatcagtaatatctgggaagaagctttcaattaagccatcaacaatttcacctaattcagttggtacaattgaacgaccatcaagtttaacataatagcggcgttgaattgtatctattgtaggtgcataagttgaaggacggcccacgccattttcttccaatgcgtgaactaatgatgcttcagtatagcgtgctggtggtaacgtaaagtgctgtttgttatcggacttagtcatcttgaccttgtcaccctcttcaagatcaggtaagtcaacattcttttcttgttgattatcataaaccttggtgaaaccagcaaatttcaatttagaaccagtagttctaaaaatcacaccattttgaacaatatctgcacgaacagtatcataaacagctggggtcatttcactggccaaaaaacgtgaccaaatcaatttgtataaacgatattgttccgtagttaggacactctttaatgactccggtgtgcgatatacagatgttgggcgaatggcctcgtgagcatcttgtgcgtcttcttgattcttaaaatggcgttgactcttagctgcaaattctgcaccataattttcatgcaaaaacttagaagcctcttgttgggcaactggtgatgttctcttagagtcagttctcatataagtaatcaaaccaactgttccttgcttacctaaagaaatcccttcatataattgctgagcaatactcatagttctacgagtacgataacctaaacgcttattggcttcttgctgcattgtagaagttgtaaatggggctgctggctgacgccgacgttgccgagcaacaactttatctactacaaagtcctttttcttatcgattttagccaaaacatccttaacagaatcgatattaggcaattctttctttttgccatcaacaccataaaaggcagatttaaaagtttctttacccttagcaaattccgcatcaattgaccaatattcttttggcttaaagttcttgatctccttttcacgatcaatcactaattttaaggcaactgattgtacacgtcctgcagataaaccttttttaactttggcccaaagaattggtgaaagtgaataccctacaattcgatcaagtacacgtcttgcctgttgggcatcaaccgtatccatatcaattgtccggggatgcttgaagctttctttaactgcatccttggtaacttcgttaaaagttactctattcttggctttttcgtcaagattcaatgcgtgcgctacgtgccaagcaattgcttcgccttcacgatcggggtcggatgctaaataaacatccttagccttcttggcttcgctttttaattctttaatggtatcgcctttaccacgaatggaaatatacttaggcttatagtcgtcttcaaagtcgattcccatttgtgacttaggcaaatcacgaatatgccccttggaagcaataacgtgatagtttcttcctaaatatttttcaatagtcttagcttttgcaggtgattccacaatgactaaggtctttttacgtttttttgttgttttacttttcgctttagtaggcattaactgcctccttaattcttattttattttatgggtacagtccaaaaataactaatactttctgaattgtcaaatctttatcttgttaaatttaaaatcaacaattggcgtagctcctgcttcaattaattgattgggacctgcagacaatgcattagtaattggtccaggtactgcataaatatcgcgattttcttgtaacgctaaattagcagtaatcagtgaacccgacttttctttagcctcagtaacgattatactttgacttaagccggccaagatacggttgcgttcaggaaaacgatacggacgcggtggtgtatcaggcaaatattcactaatcaatagtcccttttgcacaatctcttcttgtaaagcaaaattttgcattggatatgaaaaatttaaaccattgccaataaccgcaattgtttttccttggttgaaaagtgcagccttatgagctaaggcatcaacgccttttgctaagccacttgctacaacctgaccagattgcacaatattaggtaccaagcgattaataacatcttgactatacttagtcggatagcgtgagccaacaattgtaatgatttctttttgcagtaaagaaatatctcctcgggtaaacaataccataggtggtcgataaatttgacgtagtttttctggatatgcttcatcgaaaaaactgattacgtcacactgctgttcaatttgttgtaccattcgatccaactgatcatcctgaaaagcgcgatagcatgcatccattagttcctcagttaattcaatttgttctaattcttcaaattcaatttctgtttcatcagttacctgattagcaattgtcagcaatttaacataaccaatccctttttgcaattttaattttagtagaaattctgtttttttcataaaaaaagccctccactatttattacgcaaaaagagaccattatttttttataaattgaaatttattcaaaaaaatcactgactggagcaaatgttttgcggtgaattggcgtagggccatactttttcaaggcttcaatgtgctccttggtgccgtatcctgcattatgatgaaagcaatattgagggtatattctatcataatcatccatcaattgatctcgaaagaccttggccacaattgaagctgccgcaattgaattcgacttagcatctcccttaatcaatttaacttggggtagatttactggcacattcattgcatctaccaaaagtgcattcggcttaacatcaagtgctcgtactgcttgagccatcgcttgacggtcagcttcataaatattaatttgatcgattacctctgcactttttactccaataccaacactaactgcttccgctaaaattttaggatataacttcaatcgtttctctgggctcaatttcttcgagtcgtttacatctaataaatcaaaatcttgatcaattatcacagcagcagttactaccggtccagctaaagggccacgtcctacctcatcaacacccgctactaattgtcccttttcccagaactttttttcataagaaaagcgacgcaaaaactcttctttttttgctagtaattttgcttgacgcttacgataactaactaacaatttttgtacgccggcccgcggatctgcctcaagttcgttaatttgggcttcagagacctcagatttcaacagctcttttatttctttaattgtcatggtctatctaacgtaatccttccgattgcacccttacgcaatttttgtaacataaataatgaaaaacgatcataatcatcacgcatgccatatttttcagtcattgacaaaagcaaatctggatcagccatatcagcaatttgctgttcaggtaatttagaaaatttaagcaaatccttagcataaaattcacgtaaatttttcaaaacaaataatgctacatcatctgcatgaaaaacactatccttaattgcaccgaaagcagctaatttataaccaacttcctgatcagaaaatttaggccataaaatccctggtgtatcgagcacttgaatattagcatttgttttcagccatctttgtcccttagttacacctggtttgttaccgacttcagccacgttccgaccaactaaacgattaatcaccgttgacttgccacagttaggaatacctgccaaagcaattctaatagtaggatttgaggcccctcgtgcttctagcttctctgttttggcagctgccgccttttttactaaggaaaccaacttctgcatattagtattgtgcaaggagtcaagtgccaaaacatacttattatctccagctaattctgctgcccatgcctttgttaaaactggatcagctaaatcagccttatttaagataataatatgtggtttattaccaactagtccttcaatcattggatttcttgaagcttgcggaattcgggcatcaagtacttccaccaaaacatcaatcagtcctaacttatcttccagttgattacgagccttgttcatatgccccggataccattgaattgttgccatattatctcttctttctaaaattaatcattttcatcatctaagaacaccacttctgacatcaaaatctgtctatataaagccagaaagcctcgacgatattttctctcttgttgtgcaattttacctaaatagtcacgttcttgtctaaaagcatatctatatacctcagctctaaattctttctgatcatcgggtaattctttttgtttaattgtatactttatttccctagcaaaatcaaccatagaagtttgattcatttgtgcccttaaatcgaattttaattgttttcgaatctttttaggtaaatagatctttttcatttgatccatagcatactcaatcattgccacacgaactcgatcaacttcctttctttgatcaaaatcaggtatatctttgtccaagatcatgtgaaaaacaattgttggaacaatcatacttagtaaaataagcgtaatttcactcaccaaaattaaatggaaatctgctacattaatacgtaaatcatataacgtatatgctaaagcaaaagtaactgctccatgaatgccacccagactaaaaatcaatgcttctttattactcgtttttcctttaatagaagggctaaatcgataataaaagtatctaataagcaaattagctaggtataaaattattccgatcaaaatcgcatcaattgtttgttgattaaaatgtcttccctcattgaccgaacaatgatgattcccaaaagcaaaaagacaatcccatttaaaatatcaatcagaagttgcgataattgattactgttataaaaaataaaggcattagtaagcctgcttcgctcagattcaacgttatgaatcaatccggctgcaacgactgcaataattccagaaacgtgaatttcttctgctaaaaaatatattattaacggtgtcaaaaagaatatgacatcaaccggcattgcaacaccagcagataaatgatatttggagcgaaaactttcctgacgcaagaaaactaataaagtagccaccaaagctcctagaaaaaacctccacctgcagaatataaaaaattacctattgcttgtccaatccgtaattcttgatgcaagtaccaatcaactgccatattaagcaaaatgatacctgaagcgtcattaaacaaagactcatcttttaggtaaaaagcaatcttcttaggcagcttcaatccatgtgttacagattctgttgctgtagcatctgttggcgttgaaattgcagccagaataaaagccagtggtagagagacccatactaaaatagatcccgaatcccgcagttatagttgccaagataatcataataaccgttaacccaactattgcgccccacgaacgtaaaacattatacaacctagtacgttgtccctcaaaaaatagtaatggcgctacaatcaagcccataaataattccgagctaaagtcctcaattaatgaattagtttgtggtactagtgcaatagccgctccaatcgccattgcaatgtaattaactgatattctcttcaaaaagcgttgttgaataatcgtcgcaaatgctaccgcaaagacaataaaaccaataaaaattactacctgcatttttctacccacttaataaaaaagcccaggcatctatcaggcttgggcttaatacatcattttgtcttcatacattcgataagcacgatcaaaaattgacatacttggtaaataactagcattcaattccaaataatctgacaatttctcataatcttgttcttgcttaggaaaagtcaggtcatgctgtgcattattcgcaaattgagctacgtcatcagctgaatctgcatccctttgcgtcattaaatatcgataaaaactttctcggtaagccataattactccacataatataagatcgcataagcaccattgccagcatgtgttgcgataattggacttgtctctgccactaaaacattaatcgcaggattgattgcacgaattttttcagctaattcttccattaattcaggtgtatcaacgtacgaaatgcctacttctttaatatgctctttattatctgcgatttcttttaacactcgttcatcaaaagcacgtgtaaatttcttacctcgtccttttttggctacgattaacttaccttgtggcatctgaagagcgattctaatattaagcatagtagcaattcgaccagaaagtgcacctaaacggccacccttgattaagttttgtaaattaactaccatcatttccagtttttgagtactacgaatctttttaacatgatcaataatctcagccatgcttttaccagcctgagcatccttagcagcagccaaaacttggaagccttctgccctgtcggttagttcagagtcaataattgtaacattatcgctttgacctgcaatttctgcagcttgacgagcggcatctatcgtaccacttaatgatttagctaagaaaataccaatcacttgactgccatctgcggttaattttttaatcacatcaacaaaacggccaattggtggctgactagtcttaggtaagctctccgcttcattcatcttcttgacaaaatcacttctagtgatatcaatcccatccacatatgacttaccgtcgatggtaatcgtcaatgggactactgtaatgtcatatttttcaacttcttctggtgttaattggacggaagagtccgtcataacttttatcttcgacaacgtattcgccttcaattctaatttgtttacccgatttatgataaaatgtaagcaacatatatactgtattgtatcaaaaaactattagaagaaaaaaggattgattacacttcatgaaaattagcaaactttggcagcaaccagaacaacgatcagaaaggtactaccttctagataatatttttagtgccataactcatgggattggtttcggactagcagttaccggcttagtaattttaattgtaaaggcagctcatacaggcagcccgatgcgagttgttactttcacaatttatggctcttgcctggtactgctttatttattttccacactatatcacagtttagtttttacacgggccaaaaatatttttcaaatttttgaccattcctcaatctttcttttgattgcaggatcttatactccatattcacttgttgcaattggtggagcctggggttggactttatttggcttgatctggggcctaaccatctttggcatcatttactacatcttcaatcgtggtaaacacgtcatacttgatacaatcctctatgttgcaatgggatggttagttatcttgtcaggatcttatttatatgttcgcttaagtccaactggattctggctattagttagtggtggcattgcttacacaatcggcgcgattctgttcagtatgcgcaatgttccctttatccatactatctggcatttatttgttatgctcggttcaatcttaatgtacttttccgttttactttatgtttaaaaaatgtagcagttgaattctgctacatttttctttctattcaattgtagtcaaatagctttcaatcgcttcttgattattctcaacttcacctgaaacaactaactctcgaattttattcaaagtctgccccaattttgcacctggtcgcatcccgcgatctattaaaaatctcccatcaacggctagttccgacgcttttttaataggtaaagccatataacgatcaactaaagcttctgaagaaattggttgaccaacaatatgagcaacgtcaatcgtattaattaatgtctcttcccctgctaagaataattcataatcactaggagcatgactagaaagtaaatcaaatagattaataattctttcgacttgctcagtcatagcattagagtttttccagtcacgcataaaacgatgaatttgttcattcggtaatttcaatagcaaaattatcagtgaccacaaactattttccatcgttggactgaattttaactgtgggaaaatagctagttgatctttttttccgccaaaatcaggtacatcttcactcaaatttgtatcaagaaaaacctgaaaagcttgccgagcatgtggtcctaaacctaattttacaaattcttctcgaattcgttcaactgaaatttttttaagtaatttatgattatccttaattgcctgttgggtcttgctttctaacttaaattcaagttgactcataaaacgtacggcccgcatcattcgcaaagcatcctcgtgaaatcttttttctggatcacctacagcacgaatgacatggtttttgagatcatctagtccgttaaataagtcaacaatttgccctcgtgtatccattgccagagcgttaatcgtaaagtctctacgctttaaatcttcatctaagttttgaacaaatgttacatgatctggacgacgaaaatcttgataacccgattctgttctaaaagtggtaatctcataactttcaccaccataaaggacagtcaccgttccatgtttaattcctgtatcaattgacttatcaaataactcttttacctcttctggataagcactagtagtaatgtctacatcatgaacatgacgatgtaacaaaacatcgcggacagaaccacccacaaagtacgcttcaaagcctgcattttctaatatctgtaacacgggcattgccttggtaaaaatttctggtaaattatctatctttatcatattaaaatctcaattcttattgtctttattattacttttgctatacactttgttaaaattgaggaaagacataaaggaggtaatcattatgcgtaagattgacaaaagtatcttaattgatatcctcatgatcgcgctaggctgtgctatttccgctttaagtctagacatgatttctgtccccaataaactagccgacggcggactaagtggtatttcacttcttctgcggcatttttggggcatcaacatgggactatcgacccttgtattgaatattccactaattttgttaggctatcgctttatgggcaaacgtcttttagcctatacaatctggggaacgctcagtctttcctttttcttatggttttggcattcagtacctattataaaacaattagatttagaacacgacctcttcctttcagcaatttctgctgggttattgtctggaatcggattagggttagtatttagatataatggtacttccggtggaactgatattattgcccgaatctgtcagataaaatttggtatttcgtctggcaaaatgcttttagcttgtgatgcaatagtactcttcgcatccctatcttacctagacatcaagcatatgctatacacattattagcttcttttgtcttatcccgagtaatggataccgttcagcaaggtgcatacacagcccgtggtttattaattatctctgacaaatatgaacaaattggcaagatgattgatttaaaactaaatcgtggtttcacatatctaaaagctttaggtggctatcaacaaaatgaaaaacgtgtaatttatgttgtagtcgcaccgcgggaaattccatcaatcaaagctttaatcaagcaagaagatccacatgcttttgtttcaataattgaggtaaatgaggcaatgggagaaggatttacttataaaaaaccacatcgctttttcatccacaagtaaaaagctataccatgatgcatttcatgatatagcttttcttttactaataattaataattacagtcaatacgttattagctttaacgtattcgttttctccaatttgaatgaatggccgttcatcaatttctttatggccaagatttttaactttagagccttgtttaacaaacttacctggaattggctgaccatttttatcataaacatatgatggatgcttaatgcggttaattgtctcggctgtgtccttaatgtatggtaaaaatgccccttccttaacgaatttattcttaccaatcttcacaaaattattgccattaattgatttaatgcctaggatcttgtaaacacggcccttttttaaatgtccaactttttctcctttacggttaaaaatcgttgcttttctagtcaagtttaactttttaccctgacgaattggattagttgtagctgcgttaactgtctgagcagtcatcgcacctaaacttaaggaggctaagactactcctgccatatacataatttttttgttcatcatgatctcatcccctaatcattacttaatcttcttacctatattttaacaaaaaatgcagaggttatacacttttctctatttttatttatgggatggataacacttattctttgcaatctttcatggcaagaactaatcttagcttgtaagcgtttgtcaatatcaagcaatcaagaggatgaaaacaatgccaaaaaacagttactcccaagaagctttcgttcatgtctatttacttcttgggaattaatggggtaattgggtccggtgcctttttaatacctcaaacaatctataaagatatgaacttgatgagtgttttcataacaatttgtgctgctcttacagtaagtatggttactctttgttatgctgacttgtcaagtcgttttactggatcaggcgcagcttggctttattcatatcacgcctttgggcgatttactggctacgaacttggaatatatacttggtttttaggatgctgtacatatgcggcagaaatagtagctttgttaactattttaaagactttgtcccctgtttttagtaatcacgctgttcactacgggatagctattggaataattgtgctaattgtgctgtttacgattattaacttatttggtcggacaattgtaaaattagtcgataacttatcctctgctgccaaaatgattactattctgatttttatcatcattggtgccttttttattcataaaatgaactttacacctgtgattcctaaagcagcaaccctaggtgttggtccttacttcaaacattttggtgctgcatttagtgtagtattttacatgtttactggattctcctttattccgattgccccaaaacagatgaataatccagagaaaaatattcccaaagtattgatctcagtgatgatcactgtgactattttatatgcattaatgatgttagtagctatcgggattttaggatccaagatggttaattacagtacgcctattgctgtagcctttcaaaaggccgttggtgattggggctacgttctagtgattgcagggatgctgattagtgttatcggcgttgcttttgcaggatctttcaatactccatcgttgattgcttctcttgactccatcgttgattgcttctcttgctaatgagcacgcaatgttacctaaatggattggaaaaaagaacaagcatgatgctgcttgggtagctattttactcagtgcaatcatcactatgattttaatcacacaatcatacctcttcttggtatcttgcattgtattggcttcatttattcaatatgtaccatctatcttagcagtaatcaaattcaagcatactaatgaatttccaaataacggttttaagctcccattcggctatgttattccagctttggcattaattatttcatgctacatggtaaccaatttcacttggaaaactattttggtcggaatagtcgtaggggtattagccgcagtagcttacttcttcattgaaaaagatgaagaaaagcatcaaaagtatttgtcaaaaatgcgtaataaataattttcaagttataaggacgatgactagaaactgtcaaatcttttgtgtaaatagttctttctcgtaaattgattttttaattatttatttaatcaaagtaggattctaaggtgtcctgaacctgaccaaagcctttatgaattcgattgaaataacggtcattgtagctcattgcctggatgccaataaatgcatcaagcgactgttcagttggaaattctgccttaggcttagctttacgcttgatgacgttgttaaaggattcaatcatattggttgaataaattgaagctctgatttgtttgggataattgtagaagactagcagatcgggctcaacttccttcaaacctttgatgacatggctataagctttattccatttggcatagaatttgtgcaagacagctgcagcttcttttttgtttgtctgttgatgcacctgtttgaattcgttcatgatcttttcacgatcgtcgacgcgtactttagcgcagatattgcgcatgacatgaaccaaacagcgttgaaaatgagctttaggataagtcctggccaaggctgttttcatgccaacaacaccatcagaaagaaagagttcaacttgcttcaagcctctggacttcatgttttgaagcatctctgtccagacttcaatgttctcactaggagcaatgcagtagtcaatgacttccttatgtccattaggtttaatgccaatggcaatatagactgcttcacgctcaaacgtttctcggcgcaaaggaaggtatgtcgcatccaaatagacgcagaaaaacttgtcgcttagcttgcgtttgtggtaagcctcaacctttggaatcatctgcttggaaatatttgatacctgagctggactgtaatggctgccatacatcttttcaattagatcggctatttccctggtggtcacgccattggagtaaagcttgataatcatgctttccaagatatccgagtgctgcttgtagtcaggcagcgtgtgctgatgaaattgaccgttgcgatcccgaggcacttgcacttcaattgggccaaattgcgtatcaactttgcggaaataagcaccatttctagagttgccagtattccagccatttctggcatagggatcatagcccagaaaggcagtcaattcagcttctagcaagttattaacagcctgttgtagttctttgcgcaataaatcatttattttgtctggattgaatagagcttgagcaaaatctttggtaaaatcattcatgaaggagttcttctttctgtatgtgtttttttgttcaaaccaatcatacgagaaaggaactcctttttctaatgtttaaagaaataaatttaaggaatcattcatccttacacaaactattttacagtctcgatgactatccaatatcgcccttattttttgatcaattaagactttttagtctgcttttaaatctatttttcaacttatacattatgaaagcccatctcctcttaataatatttagtgctaaactgttagatagattagtattagaaaagagcaacaacaaatgagtaatcagaaagctaaaataaataataccgaaattaaaactagagtatctcacttcagaccaagccagtaaaaaaattcaagttaacataaaaggaaaaccatatgtctgaagagataattaacacagtcacaacaaaaaatgattttaagagtgcattaagaaatgcgggtattaaagatgatgataccgtattagttcatactgcactaagtaaattctattacgttcctaatggtccagaaaccattgtcgaagccttaaaagaagctgtgcctaatggaacaataatgatgccctcacaagtttctacgaattgtgatccagccacttgggaatatccaccagtacaaaaatctttgattcaagtagttaaggatgctatgccaccttataatcctacaacatcaatgacagaaggcttaggggttacgccagagtatttcagaactttgccagatgttgttcgaagtacccatccttacttgccaattgctatttggggcaaaaacaaagtaaagattgcacagaatcaacctttaaatattccttatggaattgacagtcctttagattatttgtaccagaataatggcaaaactatctttttaggcactgattatgaaacgtgtacagttttgcactatgcagaatccacaattggtagaaaaaccgaaacatgttctgctgcaactagtctggatgaaagcggcaaaactatttggactgaatatcaaaatattgatatggattcatatgatgactttaatgaattagggacagagtttgaagcaaagcatccctctgctatcaaaaaggttaagttaaacaatggtgtcatcaaagcaataaatgtaaaaccgctaattgattttgctagaaaatggtttataaaaaaagacaataatcattcaatttaataataaaaggaagaagtcactttcaacttcttcctttttctttatttaatctttgttaaaacctttgcacctatatttaaacctacactatgcgatttaccgccccaatcacgttcatcataattatccatatcagctaaagtatctgcagtgaaaagaaattgtgcaaaatcaatctttctaaactgagcacatgctgctaaagctgcacattccatttctacagttgacgcgcctaactgacgaaattgtgccacttttttaggcgtttctctaaagaaaccatctgttgtccaagtcgttatctcgtcatattctatatttagctcaactaaaatcttttctacttccttcaaaaatatagaatctagttccacaagttgtccaggattcatatagtgaaaagatgtcccttcatctcgaattgcacgtgttggaagtagcatcgcattttcaggtaaatctactaaggcacctgctgttccaatggttaacaccttttctactccataagcaattagccattcaagcaactgtacagctgccggtgctcccaagggcgcttgacacaaagtgaaaaattcgttattaatttgaacttcataaattttaggattaaaagaacatgactcaaattcacctaaagtacggtgaaaatggtgatctaaaaatgcattaatttctttttccggcacgaatgcgtaaagcaatcttggatgaaaatgaaatggttcttgatcgtgatttggttcaagaaccgcatgaggatgtttgtcaaagtctaaaatgaatggttgtttgttcatattttacactccatttttagttgaaatattatcataaactcgctaatacctgagatccaatattcaagctaacgctatatgaatcatggccccagttacgtttatcatagttatccatatcagctaaactatcggcagtaaacaaaatttgtgcaaaacttatatttctaaattctgcacaagcagctaaagctgagcactccatttctacagtttttgcacctagttttttagcttgcaaaacttgattaggtgtttctctaaaaaatccatctgttgtccaagttgttccctcttcatattggaaacctaaattttttatttcattctcaactcttcttacaaaatttttatctaatgcaataatcttacttggttctttgtagtaaaaagatgtcccctctccgcgaatcgcttcttgagggacaaacatcgtgttttcaggtagattatccaaagctcctgcgtttccaacagataaaacttgtttaactccataattgatcaaccagtctaaaaactttgttgaagctggtgctcccactggagcttgacataacgtaattagttgattattgacttccacttcatatattttaggtctaaacgaaacagttttaaatttgcccagagtcttatgagagtgtttatctaaaaacgagttaatttcatcatctgggacaaatgcaaaaagcaatttttcatgaaacttatactctaaattttcgactccaggttctattacagcttttttacttaaatcaatatctaaaacaaatgatccttcattcatatacgcgtggtgctagttaaatcgttctagacaataagccaaattataagctaaaattgcaatttccaaccggctttgaaagcctatcagactacgtgctcgattgttctcggcattgtaataggtcagaagcgaaaagtcgctttcaattgttctgcgaatagccatcaattgatgatcattgtgctttttagctcctgtcatatttttacgatatggtgtccaaagttcgtaacccatttgttttagctgttgatgcagttctttgcctaaatagccttcgtcgccaagaagatagtaattagatggatgggtattttctatcagttcaactgtctccctggcatcatgaactgatgcctttgttacgacataatcaagaatgtaaccgtcatcgctaacaatggcatgaactttgaaaccatagaagtaaattttcttggtggccttataaccaatgttggcataaccgcgaaaaattttagcacgatagtttcgaattggttggcaaacaggtaccggaaagctgtcaatgatcaagaactgtccattcaggtcaacctttttattcatttcttgccgtatctgataaatcaattgcaatagctgacgtgaacgccgattaaaacgtgagtgtgataaacaattgaaacattcacagaatcttctttgtgattcaattcctgtcttagcttgccagataagtaaagccaaaatcagactgtccgtagttttaatttgatcaatatttcgccgatgagtaaactcagccggtgcatacaaacgataccagtgccgacaaattatcactaaatctttaaaactaacttgtaaatggtggctaaaacgcttaagcttaaggcagttcaatcagatcagactcttttctattattactatttacaagtcgagtctaacaagattggacttttttattaactaaaacgatttaactagcaccacgcgtattcatatatattctcccttaatcaataaatggatagtcttcattaaagtaatgatcaataaaaatttgatgttgcttgttaaaaatcttggataatttatctttagaaaaatacttcagatcaagagtttcagagctaatctcttttgacattttttctactaattcaacagttactgcctgtgccacatcttgattaggataatgctggataaaattagttgaaacgcctaatagtgacttagttcttacttttaagccagtttcttctaaaaattctcgaacgcatgcttttggagctgattctccaaattctaaagcaccaccaggtaagccccatgcattaaaatctgatcttttttgaagtaagatttcattcttgctattagccaaaattccaccagcaaaatttagaataattggttcatgaccaactttttggcgtaaggtcttaatatagtttttaaccatcgctagtcctctacttgaatatcattcatcacaatttcaacttcatcgtctaaattaatctgactagtaaaagcatactcgggaataaaaccaagataatctttttcattccaccatgagcgcattgtttcttcaccaaaagaatgttcatgacgagttttatggcgtttcattgtttcttcaaacggaatatcaaaataataggcataaatttgatcaccaaaaagctgctgagattttttgaataaatcagcataccatttcgcattcaagataccttctaaaatagtgtaagaacagtgatgataaccatactcaagcaagttttctaataatggcaaagcaaatgtcttttctccgtctttaacattcagcatttctcttctaactgtatcttgtggaatcaatagtgtattgtgtggcaatcgacgatggatttctttagacagtgtagttttgccactgccagagtttcctcgaattataattaattttgatgtcatcatagaaatcttcactttcttaaaattaattcactgcatctctaattgttgcaaacttatcaaatgtataatctattataatctataccatgaattttaacaataggcagcattttccctttttgtcccatcaataatcctgcagaagcggctagcatgtcacagatagtttcaacattagttttatcttgatactgactttttcttaaaccagaaacaccatacaatccaattgctacttgagttgcaccttttttatcaattcttccatcactatcggtaattatgatagctactctgacttttaattgatcaaaaatatcatcactaattctcttagcaatttcatcacaatttttaggtaaaactattgcagtaccagcatcaattttatctacacctgcactagttaaaaacaaaccattcggcaaccacccaccaataaagttcttagatatctttagtttcttaccactcttatcttcggtttgatcaattataatctgaattagtcttggagcttttctaggtatttgctgatgcaaacgtaaggctaattgacttggattaatagaatttaagtgaacaaacagaccttcagatttagaaatcaatttagaagcaatacataaaacatcattatcgcgtatattaaatccttcatttttgattgtcctaattatttctgcacttaagttgcactttctctctattttcggaaaattatgcagcgcttcaattgtaatcatgactataacctcaaatcagatgttaatttgcccaaaacagtaatttcgtttctatcgcaatacttcaatgtttttatgatcggttaccatgatttatctggtatctttctcctttattaatggtattgttagcaaaacaacaccaaaatacactgcggatacaaaaaaacattacttttaagtctccaaatactttcataatactattgcttataaataatgaaatactaaccaagatctctgcaataaatgaaacagttgaaagcatagtcgacttattgctttctccataaatggcttcattactagtagctgaaatttgtcccgacatcattcccatcaatagttcaattaatagaaaaaggcaaagcagtaaatatttattttttagagtaccacttaatataaatgctccaatcatacttccagtattcaacaaagtaatcccttttgaattaaaggaagtagaaattttactaaataaaatcgaagagactgtaaaatattttgtgtaaggatgaataattccttaaatttatttctttaaacattagaaaaaggagttcctttctcgtatgattggtttgaacaaaaaaacacatacagaaagaagaactccttcatgaatgattttacaaaaaatatagcacaagctctattcaatcaagacaaaataaacgatttattgcgcaaagagctacaacaggctgttaataacttgctagaagctgaattgactgcctttctgggctatgatccctatgccagaaatggctggaatactggcaattctagaaatggtgcttatttccgcaaggttgatacccagtttggaccaattgaagtgcaagtgcctcgagatcgcaacggccagtttcatcagcacacgctgcctgactacaagcagcactctgatgttttggaaagcacgattatcaagctctactccaaaggcgtaactaccagagaaatcgctgacttgattgagaaaatgtatggcagtcattatagtccagcccaagtatcaaatatttccaagcagatgctccccaaggttgaggcttatcacaagcgcaagctaagcgacaagtttttctgtgtctatttggatgcgacataccttcctttgcgccgagaaacgtttgagcgtgaagcagtctatattgccattggcattaaacctaatggacataaagaagtcattgactactgcattgcgcctagtgagaacattgaagtctggacagagatgcttcaaaacatgaagtccagaggcttgaagcaagttgagctctttctttctgatggtgttgttggcatgaaagcggccttgaccaggacttatcctaaagctcattttcaacgctgcttggttcatgtcatgcgcaatatctgtgctaaagtccgggtggatgaccgcgaaaagatcatgaacgaattcaagcagatacatcaacagacaagccaaaaagaagctgcagctgtcttgcatgaattttatgcaaaatggaataaagcttatagccatgttatcaaaggtttgagggaaattgagcccgatctgctggtcttctacaattatcccaaacaaatcagagcttcaatttattcaaccaacatgattgaatcctttaacaacgtcatcaagcgtaaagctaagcctaaggcagaatttccaactgaacagtcgcttgatgtatttattggcatccaggcaatgagctacaatgaccgctatttcaaccgaattcataaaggctttggtcaggttcaggataccttagaatcctattttgattaaataaatgattaaaaaatcaatttacgagaaagaactatttacacaaaagatttgacagtttcctgcaatttgttttggatattcaaaatgtatatagtgagattcgcctaatgttataactttagatttaggattatttgaagtgtattctgaccgcttatattcattttcacgatacttttctgtaataacaatacttggtgttttatcacttatcctggtagtatttttccaaaacgaatcattttcgtaggctgcttgtgcgtttaaattatccttttcatcaaatttcttcgcattttgctctgtagttgtccaaaactttttattttcttctggagtaaaaatttctctaagatcagcttcaattttttcttgaagttttgccatgtttttatttttctcaatataagctggttcctttggaggatttaacatgatttctctagtagttggctcaattcctacaaaagccttcaaattattgattttatctttcatttgcatagcatacacaccgccaatgctatgagccaaaattataactttttttgcattaaaatcgttaataattttagctaatttagtagcttcgtctgatactgtatagtcctttaaagacttgccactaaagccactattcaaataatctgatgcaaaatagccatacttattgggcaaagcttcaattacttttgaaaaagattgtgctgtatcaaaactaccaaagccattcaaaaaaacaactaatggatctccctttcgataggcaaaattaatcttgcctaattcagtttcaatatcgcttctttgcataaatttctccctttattaaaactttgaagtcgttatattttaattatttcttagcacaaataccttatgcccattttcatcatcttttaaatacacgaaactacttcgcttagctacattctgactagcggaattcttaggatgagttcttaaaatcaaataatcaagcttcaactgttcaaatgcgtatttcttaagaaattcgacagattcagtcataattcctaaatgttgaaaatcattagaaagccaatatcctacttcgccagattcatgattcaaattatgtaagtcaatcatgccagctggctgtccatcaactaaaataactaggttgaatgctgtaccatcaaccattttttgttgaaacattttaattgaatcggcttctttttgaacagaatcaattttgttggcccaaactaaccatttagaaaactcagtaagatttttttgaagttgatcaaataagtcttttgcttgccaagtctctggaagaactaattcgatttctttatttttagttagaaatttatgtaaaacaaaagcagtatgacacatttcggaaactgtcaaatcttttgtgtaaatagatctttctcgtaaattgattttttaattatttatttaatcaaagtaggattctaaggtgtcctgaacctgaccaaagcctttatgaattcgattgaaataacggtcattgtagctcattgcctgaatgccaataaaagcatcaagcgactgttcagttggaaactctgccttaggcttagctttgcgcttgatcacattgttaaatgattcaatcatgttagtcgaataaattgaagctctgatctgcttgggatagttataaaagaccagcagatctggttctatgtctttcaagcttctgataacatggctgtaaaccttgccccatttggtatagaagtcatgcaggacagctgtggcttcttctttgtttgtctgttgatgcacctgtttgaattcgttcatgatcttttcacgatcgtcgacgcgtactttagcgcagatattgcgcatgacatgaaccaaacagcgttgaaaatgagctttaggataagtcctggccaaggctgttttcatgccaacaacaccatcagaaagaaaaagctcaacttgctttaagcctcgggatttcatgttttgaagcatatctgtccagacttcaatgttctcgctaggtgcaatgcagtagtcaatgacctccttgtgcccattaggcttgatgccaatggcaatatagactgcttcacgctcaaatgtttctcggcgcaaaggaaggtatgtcgcatccaaatagacgcagaaaaacttgtcgcttagcttgcgtttgtggtaagcctcaacctttggaatcatctgcttggaaatatttgatacctgagctggactgtaatggctgccatacatcttttcaattagatcggctatttccctggtggtcacgcccttggagtaaagcttgataatcatgctttccaagatatccgagtgctgcttgtagccaggcagcgtgtgctgatgaaactgaccgttgcgatcccgaggcacttgcacttcaattgggccaaattgcgtatcaactttgcggaaataagcaccatttctagagttgccagtattccagccatttctggcatagggatcatagcccagaaaggcagtcaattcagcttctaacaagttattaacagcctgttgtagctctttgcgcaataaatcatttattttgtctggattgaatagagcttgagcaaaatctttggtaaaatcattcatgaaggagttcttctttctgtatgtgtttttttgttcaaaccaatcatacgagaaaggaacccctttttctaatgtttaaagaaataaatttaaggaatcattcatccttacacaaactattttacagtctcgcctgcggcatcatatcttgaatctgcttcttggcccgctttaatatttttcccggccatttttaccaaattgcccacctgcatatggctaatattaaagccagacaggcaattgactgctagagcagtattgcgataagtggcaacgctgcttacttctaagatgtttttgactgctaaaatactgtagcgcttgtatttgtcaaagcccattaattcatccaagggataccttgcttgtttgcctgggcagacatatcttcttctgacatacctaacttcgccaaaagccatattgattgagcgctcattcttcttatcaatctgatagccctgtgctttaaccttggtaatcatttcatcatcaactttagctaaagccaaggccatgatttccttaatcaggtttaagaagaaacagattatttttctttcacgcttaatataattatcttcagactttataatatttgcgatttcagttacaattgaattcataaaagaccagcttctaatgtgttttttgttcttaacatcagactactggtctttttgtttgagctcaagtccaaattcaaaggacttgggcttttttaattatttattcaacttaccgtaaaaaattatacacttagtgacgaaatttttgctattcaaagtgctcaaaaagagacgcgtaatcgttatctaaaaaaacaaaaagctatgttggcagaacatgatcttttacccgaaaaaaagcgcaaaccacgtgcccgcatgttatcagagctgaatttaaacaacgatgatgctattttaacttttgccaataaagttaaggttttcaccagtggacccgagttgtttgaccaaataattgctgatcttaagcaagctaaaacatcgattagtttagagttctacactttttataatgataatctaggaaagcgtgtcttacgggccttagaagaggcttctgctaaaggagtaaaagtcagagttatttatgatgtctctggctcacgtggtactaaacctgctttttttaatcatttaagagagcttggtggcgaagcacagcctttcatttctacttctaaaaagcattggtttactacaccacgactaaattatcatttacaccgcaaattaatcgtaatcgaccatcatattggctatattggtggctttaacatcggtgatcagtacgttaatcaatctaaaaaatttggtcattggcgcgatacacatttacgtgttgtgggtcaatcacctatcctaatggagacacgctttgccatggattggaatacttctatcagacgaactgcattacctaaatttgatctaagcgaattacatgcttttactgtcgaacgtaaagatcttgacaacgatgataacgtagcaatgcaaatcgtttcttcaggtcccgataaccaacattatggcattcgccgaggatatgagggcatcattgctggggctaaaaactatatctatattcaaacaccctatttaattcctgaagaatccattttagaagcattaattattgctgctaatagcggtgttgatgtacgcatcatgatcccttgcatgccagatcatccctttgtttaccgagctaccgaatattatgcaaaatatttagttgctcatggcgttaaaatttacaaatataatgatggcttcatccatgccaaaacaatggtttctggctccaatatctcatctgttggttcagccaatcaagacttcagaagttataccttaaacttcgaggttaacgcttttaattacaatattcaattaactcaagaacttaaacaaatttttgaaaaggacctagctagttgcagtcttctaactaatgaatactttaatcagcaatctaaatggcttaagtttaaacaatacttttcacgtctgttggcacctattttttagaaataataaaaccacgaagcaaaaacttcgtggtatttttttacagattattataaagatcctgcatttcatcatcttctggagctaacttaagatatctttctagcagttgttttgttatttcatcattattttgtacattaaaaaagattatcatttggcgcaaaaagtctggattatccttgaaatccggataagctagtaaaaattcgctctgtgctttctgaatatcatccaaatcctcatatgataatgccatattccaatgtgcctgtggctccacgctttcctcatctaagttactaaataaggcaatattctccttagcctggtgttcatgaacatataggttagatagctgcatacgtaaatcactattgtctggcgctacttttaaccccttttcaagtaagtcacgagctgtatccaattcattcaaattagctgctgcacgtgctcccattgaataaagtgtttcatccagttcattgtacgctaatcctgcttgagcagtcctcaatacttgttcattgtcatgctgatgatcataagcttgtgctaataatggatacgcatttacatagtcaggactttgctcaatcacttcatctaagaacttaattgcctgcttatcatcacctacagataagagaactaatcctgcttcatacttagaatcaatatctaaaatactatttgcatgtttacgaataactttggcagcttcttcataattacctaatttggcaaaagtcgcaaataatctttggtacagatttacttcactaaaagtactttgacgtttgattaaatcttgatataactcaagtgcttgttcataattaccacttaaatattcaatctctgctaaaccaaatttaatagcatcttcttctggagctaattgtagtgctcgtattaatttgtccttagctgtttctattaagccgttagtttggtaataatcagcttgtactaatagactatctaaataagctgaagagctctcagggacattatataaaagcgacagaccatcgtcatcatcgccatcatttaacataatctctgccaagtaaactttaaataaatcttctttaggaaatttagctattaaagctcgatatatttcttttgctaaatctgtaaaacctaagccagttaggttttctgctaaagatgacaagacctcgggatcatcattatctaaagcttcttttaaaaggtgtttgttttgtgaaaaatcatgattttgaattgcatctagtaattgttcagaataactcataatacctccaatcaagttaccattgtactaaaaaaagacgccggaacaaagtccaacgtcctatcacattagttaagctattacttaacggcatccttaagagctttacctggcttaaatgcaggtacttcactagctgggatttcgatttcatcaccagtttgtgggttacggcccttacgagcagcacggtgacgtacttcaaaagtaccaaaaccgattaattgtaccttttcacccttagcaaggttttcttgaattgaatcaaggatagcatcaacagtatttgcaacttgcttcttagttaacttagtttttgaagcaacttctgaaactaattcagccttatttgccatgaataattcacctcctgaatttgaacctaatgttcaaaaaatttttctttgtttaagctaaacaaggaaaaatgatcacaactaatcatgtttcctaaaaacaaaaatatcacaaaagccttataacaacaaggtctttgtgatattttgcttatcttttatttacgtttacgtggtaaaatcttgattggtgtaccagtaaaatcaaagttttgtcgtaattgattaatcaaaaatcgttcatatgagaagtgcatcagttctgggtcattcacaaatacaacaaaagtcggtggattcgtacttacttgggtcatgtaataaacacgcaatctcttacccttcaccattggagttggaactaacttacttgcttcaagcaacaagtcatttaagacactagattgaattctttgattttgattatcatagacttctttaaccatattaggaatttgatctaatctttgacctgtcttggcagaaacaaaaagaataggagcatagtccaaatattgaaattcatctctaatttcacgttcaaattctttagcgcttgtactattcttttttggcaaatcccatttgttaacgacaatgatgattccacgacccgcctcgtgagcatatccagccacatgcttgtcttgttctctaatgcctgtacttgcatcgaggacaaggaaaaccacgtctgagcgctcaatagcactcatagcgcgcattacagagtacttttctgtcttctcatacactttgcctcgtcttctgattccggcagtatcaacgaccttaaattttacaccatcatgggtaaacggcgtatcgacagcatcacgagttgttccttcttcattagcaacaattacccgatcttcaccaagtaatttgttaacaattgaagacttacctacatttggtcgaccaataacgctaaaagaaataacatcatcagcttcagtatctttatcgtcaggaaaatcattaacaatctgatcaagcaaatcaccaataccagtaccatgactacttgaaacaggaatcggatcccccaatcctaaactatagaaatcataaatatcgcttcgctgttcaggattatcagctttatttacagctaaaataactggctttttagtacggtaaagaagatgagctattctttcgtctaaatctgtcacgtgatttaccacattggttaacatcacgataacatctgcttcttcaattgcaatttctgcttgagctctgatttcttcctcgatcttgccaccttcccaggtaataccaccagtatcgatcaaatcaaacttatgccccatccattcggcttgagcataattacgatctcgggtaacaccaggtttgtcctcaacaatagctaaacgttgattaattattctattgaaaagtgttgatttaccaacattgggttgaccaacaattgcaacaactggtaaaaccatttctcgccctcctttactaatctaaacataaataaaaaagccgactcaagtcggcttttttataaaatgactacttacggtcctttaattggtcaccaatgatgtcacctaatgcaaagccgttgtcgttatcactcatgtacttcttgtttactgaattttcgttacgtgaacgacgtggacgagaattatgattttctgaagaagcatttgagtcagcagccttgattgaaagtgagattcttctatcacttgggtcaatgttcaaaaccttaaccttaacactttgaccaacctttaaaacatcgcttggcttgtcaacatgcttgtttgagatttctgaaacgtgtaccaaaccttgaataccatcagcgacttcaacgaaagcaccaaagttagttaatgactttacttcgccttcaaaaatatcgccttcgtttaagtcagctgtaacttgttcaaatggagaaggttcagtttgcttaatagacagggaaatacgatgtctgtcattgtcgataccaatgaccttaaccttaacatcttgaccaacctttaaaacatcgcttggcttgtcaacatgcttgtaagaaatttctgaaatatgaactaaaccgtcaacaccaccaacatcgatgaatgcaccgaagttagtcaaacgtgaaaccttaccttcaacaacgccaccaacaactaattgtgatgcaaccttgtcaaatgcttcttcacgttcttcttcaactaaatccttgtgtgaaaggattaagcggttcttgttaggatcaatttcggtaatcttaagtttcatagtcttaccaatataaggcttaagatctgaaacgtaacggtttgaaattaatgaggctggtaagaaaccacgtgtaccaacatcaacaattaaaccaccacgaactgatgaagttacagtaccttcgacagcatttccgtcttcgaagtctttttgtaacttgtcgtaggcttctctttcctttaagcgggtaactgagaagaagaattcaccattttccttgtcgccaccggctcttcttaatactaaggccttaaacttgtcaccaggcttaactaaatcacgtaagtctgcgttacggtctgaagtgtattcacgacgagtaatgacaccttcaacaccagcgttttcaacaccaacatcgatttggccgtcttcaatgtctaatacttcgacatcgacaatatctccgacctcaactccttgcatttgctttaatgcgtctaaaaattgattactgttttctgacatatgtacctcccaatatcatgtcccattttataggaaaccgagatatttttctactattttgtgctattttttctaatttttttgttttttttcgatttgagctaaaattgcctctacaacttcgtcaatcgacatgtttgtggtgtcaatttcaattgcatcatctgccttttttagcggtgaaattttgcggtgagaatctttataatctcttgctgcaatatctttttcaatttcatcaactgtttggtcagatttaataccacgctctttaaaatctaataaacgacgttcagcacgtgatcttgctgaagcaactaaaaagatcttaacttcagcgttaggtaaaacagtcgtaccaatatcgcgaccatccataatgacatttgtcttgcctgccatttcacgttgcagacttaccattttttctcgtactttcggcaaagcggatacttccgaaacattagctgaaatttcaggcgttctaatttctttagaaacgtcctttccagctacatatactttttgctcaccattttcagatttcaattcaattccatcttcatcaatggcattcaagatacccgcttcatcaccataatctaagttatgattacgagcaatcactgtacatgcacgatacattgcccctgtgtctatatagacaaaggataatttacttgcaatgattttagcaactgtacttttacctgctgatgcaggaccatctactgctacttgcattctaataaaaaagagatcttatcatcgaccccttttatcctttctgaaagattatttcaacttaagtgtctgacctgcttcaatatttgaagagtctttaagattatttaatctggctaattcatcaacagtcaagccattcttttctgcaatttcatttaaagtatctccactttggactaaataagtcttaggagtagcagaactactagatgagcttgaactagccttttcagactttttcttgctaaaagaagatgatgaggttttcttagtcttaacagacttggatgatttagaagaaaccttcttaactgtttgaacttcttcagctttttctgaatggcttgaagccaaacgatgaacaactgggataagtgcaattaaaataaccgctaaaattataataactgctatccaacgtgctgatccactaggctgactatcttgtgagcttcgcttttcagtaggtcgttcatagtgctgatatggcccggttgactttttatccatcaaaaattcctccattcacttaacggattaattttagcatattttaggatgctttgaatatgaaaaatcccatcaacttaaaaaattgatgggatgataacttaattcaaattaaatctcttacgaacgaatggcttaattgttttcaaggtagcttcaaacaataagtaaacagccacagcgttaattaatccttttaacaagttaaagggcatgataatactaaaaatgtaggttgacattgatggtaaatgcaataactgacccaagtaaactttctcagtaaagcttaacaaggcactatagctattaatagtaggcaagtttggtaccgctgttactgcgtaaataggagtcaaaacggaggcattagccaatgacatcactgctgccattgcgataatcccaattaccaaaccacaaattggtttaactctgcccatcattgtcttgcggttatccgcactcacatttttacttaataaataaaatggaactgcaaatgacattgaagctaagaatgctgctagatttccaacaaggcttggtaatgcaaaaccactaaaaattaaactaagcaacattcgaattaaagcaataataactcccggtacaatgccaaaaataaacattccaattgtaataatgacatctgaaaaatcaaactttaagaaggcaactccaggcatgattggaaattcaaatttcataactacaaaagcaatacagccaattaaagcatatgcaatcacattagttaaactactattcttggatttagcttgatccataacttactttccttttccaaaacaaaaggtctattgcttcagcaacagaccttaaaaagtgtagtaagtttttttagcctgtcttcttccatctagactttaactatcggtatctaacgattcaaccactgacgtgggtcgcggactttcaccgccggtcgggactttcaccctgccctgaagacaataaccttgaatatttaattacagttataatttagttcaattgcattaatttgtcaacttcatgcttcgataattcccgatattgccctgatgtaagcgaatccagagttaaaaaggcatatttttcacgagcaagcttatcaactaagtgacctactgctttaaacattcgcttaacttgatgataatgtccctcatgaattgtaatttggacaatttgtgtgtctttcttatgatcagttttcaatactttgaccttggcaggcgcagccttaaaatgatccaactttactccttgagtcaaggttttaatttcatcaggagttaaaatccctttaatcttggctacatagaccttagccacttcatttttagggtgcatcaataaatttgctaatttgccatcgttagtcattagcaataaacctgacgtatcataatctaatcttcctactggatacaaacgatatggtaaatcttcgaaataatcaactacagtttttctaccacgatcgtcttctgcagtcgaaacaacgccacgaggcttataaaacaaatacgtgtgtaggctttcccgctcaattggctcatcatcgactgtaatattactaaaagtatcgactttagtacctagcttagtaacaacatgcccatctactttaactcgaccggctacaatcattttttcagcttttcttcttgaagcgattcctgcttccgcaattactttttgtaatcgttctgccattttctatccctctttttctaaatgtttgtctgcgctaccttttgaatcgaataagtcaatctcctcaccatcagttgtatcctcaaagtcttcgattaacggtaaatcagccaaactttgataattaaaatattgtaaaaaataatcagttgtaacatacaacttaggatgacctggagcatcttttttgccgtcttgtttaattaatcctcgccaaatcaatgtctgtaaagctcctgatgaatttactccacgaatatcatcaatttctattctagtaattggttgtcgataagcaataattgagagaatttcaagtgctgattgactcaaattcttagttaaatctttttgaaaatgcttttcaattatcttagctgtctgttgactagttgtcatcttataagtatttgcaatatgaattatttgcattcccgagtctggatcagccttcattttttgctgcaaacgagtgactaactgacctagctcttcaccatcaacttcaagtagttcaattagattttgctcctcaagcccattgtcacctgcgacatacaaaagagcttctaaatttgctagtttacttgccattcgtatcaattctttctaaatttaaatcaccgaattcacgtgcttgtgtaatctgaattaattgttttttacacaattctagtgtcgctaaaaataagccaataacatctgagatattctgcattttgtccgcgcaagcaaagaaactaacttgcctttttcgtttcaattgtccatgcaaaaaatccatcatctcattgatcggcgtttctgctactctaattgaagcggtatctggttgctgcaacttcaaacgatgtaagaccatcgtaaaagtcgtcgctaattcttgtgcagttatctgacccttaggcagcggttgaactttagcagtggttgatacactagcttctttagcaactgtaatcggtacttcttcattacgttctttaaaataagcagatattttcttaaacacagaatattgtaccaattgttgcactaattcgtctcttggatcttcatcaggttgaatatcatctacaaaatcgttttgaggcaacaaatactgtgatttaattcgcaataaagttgatgacatgacaaaatactcgcctgcaatttgtaaatttaagctttgcatttggcgcaagtattctaaatattgactagttatttgggcaattgggatatcataaatatcaattttttgcgattggatcaaatgcagtaataaatcaagtggtccttcaaaattcggtaattctaaagttaagttacttttgtccattatcttcttctatcgtttttaataaatttgtatattctggtacagcagttattcgtttatctggatattcgtgctttagttcatcaacaattttccgttcataactaatctcacgaaaaccaggagctaaagacaaatatctaataattacaaactgattagatacttgggttcctattacgcccaccatattattttgactattacgataaagatacaaaataaagtcattttcatcctgattaagcgtgatttcttcttttaagttttcgatatttttaaaatcaggtaaataggatagtaatcccattgctatcttctcataatcttttttatattgtattagcatttaatcacctaaagacgaggatgtgtcttctgataaacatttaaaatttgcttttgtgataaattggtatagatctgtgtcgtgctaatatcagaatgtcctaatatttcttgcactactcgcaaatctgcgccgttttctagcaaatgtgttgcaaacgtatgacgtaaagtgtgtggcgtgacatctttagtaattgccgccatttgacaatactttttgatcatctgccaaatagcctgtcgtgtaatcttttttcctcgattatttaaaaaaatatgttcatcgcttttccctacttgtaaaattagcggatcacgaacttcattttcatatttttttatccaatcaagagcaacaggactaattggaatcaatcgttctttttcgcctttaccaagaacccgaactaagcctaaatcgtcatgtaaatcctgcaactccaaattaattaattcgcttactctcattcccgtggcatataatgtctctaagatagcacgatcacgtatacctaactttcgtttagtatttggctgctcaagtagcctattcatttcagcttgagagagagctgtcggcaaacgacgttcttttttaggcaaatcgatttccaacattggatttaacttttgaatattttgccgagctaaccattgataaaatttacgcatgctagaaataagtcgactaattgagctggttgctttgttcaaatcacgctgccgagctaaaaacgcatccacatcgcttgcttcagttggccatgaagccataccttcattttctacaaaagtttgaaattcttctaaatcttgacgataagcattaattgtattatcacttaatcctcgttcaacttgactatagcgtaaataatcatcaatttgatcttttaaattaatcttctccattatcgttctcttctggatccttaattaaagtaatcgtacctgctgttttatcttcttcaattaatccagccttgagcaaatgaccgaccgcacgtttaaaagctgattttgaaataccaaagtatgatttaatttcttgtgcacttgatttgtcatagaaaggtagagtcttggtttctcttctccgcaaactcatcaaaatcatttgcgcatcatcatcaatttcttcaaaagcacgaggcaaagcactcaaattcaaacgtccatattgactgacaccgactactctacccttgaattgctcacctagtctcataggacgtggcatctgcgattcatgtacaaagccaagataataatcactagttaaaacaaatgctcctatctctcgtgtaacataaaccgttgcaaagacattttcattattcattccacgtggaaagttagcagctaattggtcaaaaatattttcatctgctagcttagcccaaatacgatctttttcgtcagtttctaatcttactaaaagtcgatcatcacgtcgaggccatctttctttttctctaggaagatcatccattgataaaacaacgtctttatcaggtagacctacatcaacaaagacgcctaagcctggacgtacctcggttacttttccccaaccatattgatcgggttgcgcgaatggcaaaaattgtgtcatttctcgatcatgacttttattatcataaataaaaccttcgacttcatctccaattttaggaatatcatcttgcgtaatctcgatcttcttcaattcataagtcagtccatcaatttgaacataataagctttatcgttttcgtcagtaatttttcctttacgaactgttccaagcatttaaaaatctcctactttacatattcttacatataagtataagagatttttatgcaaaataaaatagccagcacttaagctggctattttttgattagctaatctatctaaattatattcttaaaattaaaggtttgaaattttgccttggtagatagcaccacgacgagcgtcaacagtaatagttgaaccatcagaaatcttgtcagtagcgtcagtagcaccaacaacaactgggatacctaatgataaaccgataactgcggcatgtgaagttaaacctgaagcttcaacaactaagcctgaagccttcttgatagctgggttgtagtctgggtcagtagtcttagcaactaagatgtcgccttccttaaccttgctatttgcttcttcagctgagttagctacaacagccttgccgataactgaaccgttaccaacacctaagccttgaactaacttgttaccgatgatttgtaacttcattaagttagttgtacctgagtcaccaagtggagtacctgcaacgataattacaaggtcgccatcctttacgtaacccttttccttagctaccttagcagccatttcaaacatgtcatcagttgacttaggcttttcagtcaatactggttgtacaccccaaacgatacccaatgagtgttgaaccttttcgtcaaaggtcatagcaataatgtcagcattgggacggtacttagaaatcatacgtgcagtgtaacctgagttagttgcagtaatgatagtcttaacacctaattcttgagcagtacgtacaactgattcaccgatagcttcagttacgtttgaacccttgtaagcttcgaatctttgaagagctaaagtattacgcttaagcatttgcttttcagtacgttcgtcaatttcagccatagccttaacagccttaactgggtaaagaccatttgctgattcacctgaaagcatagttgcgtcagtaccatcaagaacagcgttagcaacgtctgaaacttcggcacgagttggacgtgggttttcttgcattgagtcaagcatttgagtagcagtaataactggcttaccaagtgcgttagccttgcggattaggctcttttgtacaaatggaacttccataaatggaatttcaacacccatgtcaccacgagcaaccattaaaccatctgaaacttgcaaaatttcgtctgcgttgtcgataccttcttgagattcaatctttgggaagatcttaacgtagtctgcacctgcttcttcacaaagcttacggatgtctaagatatcttgagccttacgtgcaaatgaagcagtaatgaagttaataccatagttcaaaccaaacttaatgtcatcagtatccttttcagtaatacctggaaggcgaatttcaacaccaggagcgttaacacccttctttgaaccgattacaccagtgttttgagcttcacaaacaagttctctctttgagtcgtccttttccttgatcaaaaggtcaaccaaaccatcatcgattaatacgtgaccaccaacgtgggtatcatcgtataaaccgtcgtaggtaacgtggatcatgtccttgttacccttcttagtggcatccattgatacacggatcatgtcaccagtattaatagtgaacttgccaccttcttgttcagtggttctgatttcagcacccttagtgtcaaggtcgataccaagaagtaaaccagtatccttttccacttgacgaaccatcttcatacgagcaaggtgttctgggtggtcaccgtgtgagaagttgaaacggaatacgtttgcaccagccttagctaaagcagtaatagtttcaatatcgtttgaagctggccctaaagtactaacaatcttagttttcttcattattaaaaaaatcctctccaaaaatcaactaaattaatatttagtcatttcttcatttacatccaataacgcataatcaccttggtgtttaccgtcaaacaaatcaagaatgtcgtgggtattaagttcaccattctccatgccgacagctaaaccgcccttcccatcgagaagtaacttaacagcataattacccatcttagtagcattaactctatctgtaacagtaggtgagccaccacgttgcatatgcgcaaggacattagcacgagcatcaaagtcaccatatttaaggagttcgtccttaaacttatcagcagccataacgccttctgctaaaacaatgataccatgatctttgccatctgcaaaaccacgagtaagagtttctgcaatttccttaacatcgtatgaacgttcaggaattacaattgcgtctgctccacttgctacaccgacacgcatagcgatatcaccacattcacgacccattacattaacaacgaatacgcggtggtgactgcttgcagtatcacgaattttatcgatagcatccatagcagtacgacaagcagaatcaaagccgatcgtgtagtcagtataaggaatatcattatcgatagttcctggtaaaccaactgagtttacgccgtggcgagtcaaggctaaagcaccatggtatgaaccgtcaccgccaattacgataaccgcatcaataccgtgtttctttaattgctcaacacccttttgttgcacttcttcttgtgcaaattcagggaaacgagcactgtacaagaaagtaccgccttcactaatcttgtggtcaacattttccgtggtaagcggaacaaagtcacctgcaaccaaaccagcgaaaccataacgaattccaaagacttcaagcccatgatggatagcagtcttcgtcacagctctaattgctgcattcataccaggggcgtctccgccactagttaaaataccaatccgtttcatgaattcacctcatcatgattattttgtgtaatttctcacatcacataaatattaacattttttaggcaaaaaagctcacaaaaattgggctaatttatgctttctttccgtatttaagtttgttagcacttacatccatcgtcaaagatagctttgtaatttgaactttattctttaaaattaacttttcgcaaattggttaagaaatactgttttttattttggtcaaatcgatcaccttgaaccttgactcctagtaaataaatatctccttcttttaaaatagagccaaatttttcataagccggtggaaaaataataatttcttgttcgctagatgtatcagcaaaactagcaaaagccattgtttttccatttttggtcctaatttgctttaacttcattaatttacccacgctaataccactatcatttaactgaaattgattcaatggtctagcgttaaatttttgtgcatatttttgtacagctattagaggagtagttgttgtagtaaagcctaaagctttctcttccatttctgctttttgggcagcagtcggtggctcagcaggcttaagtggtgcatcccccagaatctcagataaagacatattttgtcccgttaattgcacattagcaattacatctttgcagttaagcaataactcattgcgattatcttcgattgagtcaaatgctccagccataatcaatgcttcaattgcgtctacttgtaagaacttagcatcgattctacgcaaaaaattattaaaagacttatacggtttagtattggcagctatttccttagcaaaatcaagacgtaatcctttaattgcttttaaaccaactaaaatcttgccatcttgtaaagtatagtctaattggctgtgattgatatcaggcggcaaaatacgaactccagcttcctgagcttgcatcgaatagctttgcactttagcagacgttgatgaattgagcatcgctgtgtaaaatgcagcaggataatgaaccttcaaataagctagccaaaaggcaatcttggtatatgccaccgcgtgtgaacggttaaaaccatagttagcaaattgctctatataatgataaactcgctcacctacttctttaggatgaccttttttgaccgtaccagcaataaattttccacgttcttgctcaatgacattctgattctttttagacatcgcacgtcgtaaaatatcggcttcacccaatgaaaatcctgccaggatttgagctgtttgcatgacttgttcctgataaaccaaaattccataagttgattgtaaaatttgctttaaactgggatcaggataatgcacagtagccgtaccattttttcttgcaacaaatgcgtcaatattttgcattggacctggacggtataaagcgttcaccgctactaggtcctcaaaattgtcgggatgcaatttacgcaaaacaccacgaatcccaccagattcaaattggaagactgcatctgttttaccttgttgaaacagttccattgttttgggatcatttaacggaattgtattaggatctagctttacaccttgctgccgcactaaagctaaaatattgcctaaaactgtcaaattgcgcaatcccaaaaagtcgatctttagcaaacctaatgattcaacatattttttggtttgctgagttacaggaatgccgaaaggaccagcctgcaatcccgaaatgccagcaatcgaatcatcactaatcaccaatccagccgcatgaatagaataatgccttggcaatccctcaagtcctaaagcagtcttaaataacaatttattctcaggcgttgcatcaaccaataatcttagttctctagactcttgatatgctttttttaatcccattttatctttagagtacgggattgcgtgagtccacttagtgatttctggtcctgttaagccaaaaacccggccaacgtctcttaatacttgtttagcagccattgtaccaaaagtcaaaatttgagcagcatgatccatgccatacttttgatacatatacttaattactgtattccgttgaatatcaggaatgtccagatcaatatcaggcatctcatgacgagccggatttaaaaaacgctcaaacagtaaattatattggatgggatcaacttcagtgatacgcaaagagtatgaaaccagtgaaccacaagctgaaccacgtcctggaccagtagtaatttttactcggtgacaatagttaattacatcccatacaatcaaaaaataatcatcgaaccccatctgattgatgactcgtaattcataatttaatcttttctgatactcggctggaatacttttttgaccaaagcgcgcttgtaaaccagtttgagccaaataacgcaaatattcttctgaagtcggaaacttatcttgatgatatttaggtaagaccggtttttgaaagatcacttcagcattacatttctgagcaattttccaagtattattaattgcatcatccaagtcatattgatgatagcgttctaaaacattttgtgcagaatctaaataatgcgaaccagcttgcttagctagtggcaatatatcttgcaatttatctcccttagcaatcgcacgcaaagttttttgtaaaaattgctcacgtggccgtaaatattgactatcttccactgcaactaaagataattcaaattgcttagctaatccacggacataatcaatgtaatctatacttgcttttgaagcatatacacccaaataaagatcaaacgttaacttctttagttggcgaacataatcactgcctaatgcctgatttgtatcatgcagcgccattaattcactttttagattagctggtacgataatcaacaaatcatctaaatatttggttaattcattcagcgttaagaccttatcgttttgcccattttccgttaacaaatttaccgcgctagaaagtcgcaataaattatgatagcccttatttgttttggcaaaaactagcaaatcatatttttgggtgctatcaaccaaaccatttaaacgcagttgcatcccaagaagtggtttaattcccgcctttttagccaactcataaaaattgaccaaaccataagtcacgttcacgtcggctaaaccaaccacaggatagcccttctctttagcgtcttttatcaaatcacttaccttggttggactacttaaaagcgtaaaggagcttatgttttgaagtgctgctacttgcataaattaaccacctttcgtcattacaaacattaaattaagtataccaaattgaaccaatcaggtttgaatttgcgcttcatttttgataaaatcttacacgaaagaaggaatcattatgggtcgttatatcatcacaactgtatggagcgtaatctacatgttagttgtaggctttattgctggtcctttaacccgaagtgcttcattcaacggcacagatttaagaaattgtgtaatcgttgggatcatttttggtattcttttctcagcaattattgcgactattactgctcgttcacacaaagataatagtaaatacagtaagttaaaataattattcaatctattcaaaaaagacgtgagatgtttttattctcacgtctttttcgtttggtttagtaaaacttataattcttttttgtatctacttcgactggtccatgagtcaaatattcgctaaacatttgtacatagtccttatccaaagtggtttcaattttgtccatactatattcaggataaaatcccccacccatagcacgatagttgttaactgctaaatgataaatctgatcatctttgattggcttaccgtgcaaagttagtttagtcagccgttcacctactggtctggataaatccgcttcatattcgactggataaaagacgtcaaaatgatacaacattggcttaggcttaatccatcgatcaataaagccaatgtttcctgcttcatctttcttcaaaaagccagcagagtgctcaataatatgacgtaattctttaccagtcagcttcacacgacacaactgattagcatacggataatttaacaaaacatctctcatagtaatggtcttatcaaatcccttagcagtctcactcatcactgcagttgccgaaacatcagctttagtaaaccataattgcatttgctggattaaattaataaatggcgcgccttctattctgcctttcattgcattttcaattcgagcaggtttatctaaatgtgcaattggttgatctagccatttttgtgttcttttatccaagtcagatacaatatcaacaattacaggatcaggatcataatctttagtgtcaatcaacttagtggacattgatttgattttcttagtatcatcatcaatatcaagaaccacttcagctacagcttcaccgcgataacctggttgaacaatagcagtatcgcgtgtaaccaaatttaagcgccgatgctggtgacctgtcaataggacatcaacttctggaattttggttaaaatctgataaccttcattttcaccacgattaggttcagtcgccttaccagtttcaggatcactttcaaagccaccatgatacatcacagctaaaatatcaacctgagggcgtaatattttggcataatgcttaattttttcgtaagcagaggcaaactttaagccttttacattttctttaggttcccaatgtgggatatattgcgttgtaatccccaataaaccaatctttaagccatttctcttgataatagtgtattctctaccaaaaaatggaacttctgtttctgcatccagtacattatcattaatgattggtgcctcattgttatcaacatagtagcttaaataatctaatccaaagttaaaatcatggttacctaaacagcgagcatcataccccactgcattataagcttgcgtaaaaatacgtaaatcactataatcgccagttgaatgagcataggaagcaagtggtgagccttgcaaacaatcacctgcatcggtaactacaacattgttatcaccatactttttcttttcagatttaataactgagctaactctactcaaactaaaaggagcatgatagtcggttttattttggtaatcagttggcaataaaaatccatgtgtatcactagaatgtaaaaatactaacttcattatttctttttcctttttctaggcataaaaaaagacaccatatcaaaggtgtcctttaactagttattgctgttgtcgttgttatttacaacttgacgacccttgtaataaccctttggtgaaacacggtggcttaagcggtattcaccagtagttgcatcatagtgcattgctggaacactcaacttaatgtgaccacgacgtgaacgtttcttttgtttagaagtatgtcttgcaggaactgccatttaatttgatctcctttattgtagtcttaagcttcagggtcatataaccccgaatcactcacgtagttcaatcatactattcaattgctaataaatcaagatttattctattttcttctcttttttattgaagaaagtgaccttgtgatccgttttttccttagtatctcgtccaaagaaccaagcaataatcatcccgataatcaccattaccactaacacaacaattagtggtaacctcaccttaaaaaagccaaaattaattgcgacaggtgatgtatttaaaacaacaaaaattactgcaattaaagccacaactgatccaataattaaatttctttgtttttccatctttttttactttctagaagcaaactttaaggaaatcttatcaccaatcgatggaaatagattatacaatttagccgctacagctaaactaagtggtaaatttaattcacgtttatcactgccaaagaagtgaactacttgccaagcaacatcatctggatccaacataaattcttgaacatttttgacataatttccagtcttatctgctacattaaggaaattagtataaactggtcctgggtttacagtcattaccttgacaccaaatggctttaattctagccgtaagacatttgaaaattgaattacggcagccttagatgaactgtaagcggctgacttggtagttggtaccttgccagcaattgagccaaaattaataatttgaccagtcttttgttccatcatgaccctacctactaaacgagtaaagtacatcaaacctaaaacattaacttggaacatattggtaacgtcttgcattttttggtccataaattcttcgaatttaccaaaaccagcacaattaactaaaaagtcaatgtgttttacttgtttagtaattgcattaaaggtttgttcaatttcttccggcttacccatatctgttggaaaaacatatgcttcagcaccggatagttctttagcttctgctgcaatttcatctaattggtcctttcttctagcaattaaaattacagtagcaccacgaccagcactttcaagggcaatggaacgtccaatcccacttgaagcacctgtaattacaacaactttatttcttaatgagtctttcatttttctgagcctttcattggaatattaatctgatcaaaatcattaactaatactgtattagaaaatacttttttagcctgtttttcgagttttttccctttagcacccatataacgagcagaaatatgatttagacataataatttaacattatctttccgagcaattttggctgcttcaaccgaagtagaatgataataatcatgcgccaatttttgttcatcccctgcaaaagttgattcatggactaaaacatctgcatctttagccaaacgagcaatacttggcgtggaacgtgtgtcatagatgaccgtcacaattcttcccggtttagtaggtcctaagaaatttttaccatccaaaacagtaccatcagctaaagttactttttcgccattttttaatttccccaaaagtggcccattaggaacattatactgtgctaacttgtcaattaataattcgcctggatgtgaagcctccactactctaaaaccaaaactaggtatccggtggtctagttgctccgtatacactcgaaagcccttatcctcacagattaaccctgatttagctaattcaacaaaccttatagaatatgaaattttagtccgagataccttaagagctgttctaacaaattcttcaataccactgggaccataaatagtaataggaccaacatcaccttgaaaagaacgagttgacaataaccctggtaacccaaaaatgtgatcaccgtgattatgtgatataaaaattttggtaacttttcgtaatttaatatttgttcttaaaatttgatgctgagttgcttcacctacgtcaaaaagccagatttcattcaattcatccagcaacttaagtgcaacactagaaacattgcgttgctttgaaggttgcccagcaccagtacctaaaaattgtaattccatgaaaatcctattctaatctaaaattttgaatgcttaacaattgttttggtaactaatgcactatagtattttgagccctttaaattagggtgagtatgatcaccgtagaaccagtcaggatgattcttcgagtatgaataccaatcaattattataagattatgataccgttttgcaccttgatttagcaaattattcactgaattttgccaatctctagttggaacgtgaacattaatccagaaaacttttctcttaggtccagcctgatgcattattcgatcaagatcttccattgagaaaggtccattagttcctaaccctattaagatattatctgctaaaactccttgactttgataactatctaataagccaaaagcaacattcaattgtcttgaaacagcagcatcaattaacgctttaggcattaatcgttttaaatcgttgctcgaaccggccattaccgagtcgccaatcgcagttacttgaacatgttgagcaaattgcaaatctaactgggaaataccatatttaacaaaggatttgttaataggatgctttttagtttgaagctcagcttcacgaataattttagattttttttcttttttctttttttctttttttaacttttcaattaatttagcattatccgttttttgttttttagaattctgattaattcgctgtgctaattggcttttattaaagtcttctgcttttactcctggtgaaatagcaatagctgctgatcctaagattaaaatcaaagctgctaaggctgcttgacctttcttaaagtaatcttttgtttcaaaattaaaaattcgagcaaaatattgcttcgttttatcccaggtaatcctacccattggtctttcaatcaaacgataagtaatttctgtaatcactaaaattaaaatcacttcaataaggtgatacagcattggattatcaccaatatttaccttatcttcaaaaaagatcattactggaaattgatacagatagatgccataacttcgcgatccaatccaatcaaataacctattagttaggatttgattccaatgactaccaggatgagcaattaccgctactaaaatacatacatctaaagtaaataacaacatcccgccagagtaagtaaaggcttgttgtggattcatccacttagagaaaaacattgctaacattaaagcaaatgaagcaaggcccaccaagtccagtatccagcctacttttcgttcaacttgctgatttaaactctctatcggccaaacaactgctaatgctgctcctaatcctaaagaaaagaaacgagtatcagttccataataaattcgattaatatcagcctttaaaaagtataggattgccatttctaatgcagaaacagctgatagaccaactaaaatccagaaaatattttttttctttttaaccaatttaactagtaaataaatgacaattggccaaacaatataaaattggccttcaattgacatcgtccataaattagtaaatggtgattcattagctgcaaaacgctcaaaatagctttgaccattatgaatttgccaaaaattaaatacatttaatagatttgcaagtacaacctgatttaatttagccagtaaatttcgttgaaagataaagatataggctgcacttaaccataaaacagtaattaattgtggatataacttttttattcgactcaaataaaaatgacgattattatatgatcctgttttatcatatgaattaaacatatgatctgtcaccaaatatcctgagagcacgaaaaaaatcggcactcccagatatcctcccataaaggaattaggatccaaatgataaagaattactccgataactgctaaggctctaaggccagaataccccgtaataaacctattttttttcataccctatctctactcttattgtacgaattcaaagacaaacttgccaatagccacatcatcaccattaacagctcctttttcacgtagtgcgtcatcaacacctaaacgcttaagctttcttgctaaacgcataataccgtcttggtgatccaagttggtcatttgaactaatctttctaattgttcacccttaacgataaattcatgttcgccaacttgctcaactgtaaattcattcttttgtggtgcctgatacttatattctttaatcttttgtgctagcttaggttgttcttcagcctgttcttgttcaacttcagttactaagttggcagtatctgacatcaacttatctacgcctttatgagttacacttgagatctcataaataggttcattatttccttctgcttttaatgcttttttaaactcagctagtttttcctcagcaccaggaatatccatttgtgaagctacaatcaattctcgcttctttgataaatctgtttcgtaatttttgagttcttttttaatggtatggtaatcatcaattgcctcacgaccattattaggatccattgaaactagatgtagaattactttggttctttcaacgtgacgtaaaaattgaattcccaagcctacgccttgactagctccttcaattaatcctggcaaatccgccattgaaaagtcacgaccatctggcaagataaccattcccaaattaggagttaaagtcgtgaattgataagcagcaattttgggcttggccttagttgttactgataacagtgttgatttaccaactgacggaaaaccaactaagccgacatcagccaataattttaattctaagcgcaaaacgcgatcttcacctggttcaccattttcagcaatttctggtgcagtattaacactagttgcaaaatggatattaccgcgaccgccgcgaccacctttagcaacgactagttcttggcccttttcagttaaatcaccaatcaattcattagtgtcataatcatatacagtagtaccaactggaacttttaaataaagatccttagctgcacggccatattgtgatttaatacgaccattttcaccactatccgccttaaacttacgccgatagcgaaaatccatcaaagttcttaagccgctgtcagcaacaaaaataatactgccgccacggccaccatcaccaccggctggaccgccattagggacgtatttttcatggcggaaagccaccatgccatcgccgccttttccggcttgtacttcgattttagtttgatcaacaaatgtaggcatgtatatctcttccttccgtcttaatctagcttttaatactataccacagaaatacgcatgatatcgcgttttctcggattacaatgttaattttaccgtttgtgcttgagtaagcgttaatcctgctctacgcaagtcatcaattgaagcttctttaattttcttcaatgaaccaaattcgcgcaataatttgttacgacttttaggaccaattcccttaatcgaatctaaacgactggacaaagcatttttagcatggcgtcttctatgaaaagtaatcgcaaagcggtgcacttcgtcttgaacgcgcgtcattaaataaaagccctctgatttgggattaaggggaatcagtttcaaaggaataccgttgatgggatcgccaaataataaatggtttgttctgtgcttatcatctttaaccatccccgcaactgggatattcaaatttaattcatttcgtaaaacatctaaacaagcatcgacctgaatttgaccaccatccatcaaaatcaaatcaggcattcttttatgctcgcgcaacagtctaccatatcttcggcggacaacttccctcgtgttgcgtacttcgtcgccaccattttgatgttcaacctcaccttttagcttatatttacgataagctgttttttcgggttcaccatctttaaaaacgactaaagcagagactgggtcagcaccttgaatatgggagtgatcaaaactttcaataaagtgtccatatggtaagcctaaagcatcaaaaatttctttttgagcgcctttagtttttcgattacctagttctaataatctaaacttatcatctagctttaacttagcattatccttcgccatgtctagcaatgactttttctgccctcgttgcggtgttctaacaggtaccttcaaaacctcagctaaagtagcattatcaaatccttcaggaatcagaatttctttgggcaaaaccctatttctttgcccataaaattgcacaataaaggaagtgaaagcatcttctggatctgtggcatctgtcaaaggaaacattctggtttctctacgcaataactttgcttgccgtaaaaagaagatttgaacagaaatccaagacttgtcaacgtaataattaaaaatatcacgctgcgtattatcattggaaataattttttgtttttcaaccgtttcttcaatatatttcaattggtcgcgaatttcggctgctcgttcaaattcaagattgctagctgcttgagccattttttcggtcaaactctgcttaacactagcaatatctccattcaaaaagctcttgatctttttaatttgctcttcgtattctttttgtggcacttttttaaagcatgcacctaagcactgccccatatgatagtaaagacaaggtctgccttgataaccatgacagcgccttagtggaaaaactttttgaataaacttcaaagtggcctgggcagcatatacattaggatagggaccaaaatagtagccaccatccttatgaacgatactagttaaccgagtttgcggatcatgttcacgcgtgatttctatgtaaggatatcccgtaccctgctttaattgaacattataataaggttgatacttttttattaatgtaatttcaagtaaaaaagcttccttatcagttgatacagtaatgatgtcataatctcgaatttcacgaactaattcagcacgacgtccaacctgtttactcttaaaatatgagcgaacccgattttttaaatttttagatttaccaacatatataaccgtaccgttaatatctttcatcaaataacagccgggtttttctggtaaaagttttagtttattctcaattaattgtgttgccattatctcatctcactgaaaaaatttgcatttaatagtttaacacagactgtttaagaagatcttaactttgcttatagaaatagctattcggtacaaaagttgatatattaaaagaaataaaatttgaggagaacttttgatgactaatctagtttttgacttaattaaccaatttggctacctagccatcagtttgctaattgcaatcgaaaacatctttccccctattccatccgaagtaattctatcgttcgctggctttgcaacccatcattctcaaatgaatgtcttcggtgtaattattgcttcaacaatcggcgcggtagttggtgcactagttttatattggattggcactttacttaatccagatcgattagaaaagttgttcgatcataagttattcaaactacttggctttaaaaagggtgatgtacaaaaggctatcagatggtttgataaatacggtaccggtgcaatcttctatggtcgctgcatccctgtagttcgtagcttaatttcaattccagctggaatagccaaagttaaattacctaatttccttatttacactagcttaggcagcttactctggaatgctattctagttggtcttggttcctatatgggtgaaaattgggaacaaattgtgttaatttttgaagaatactcattaattattggaggacttattctaattgctttaatatatttttcctgtaaatggtataagcaaaaaattaaagctgattaattcaaacgctctataaaaaatatagagcgttttcttcttttaaaaattaaaaatatcatgtaaaattaatctaatctataataagggaagtttgcgaatgaaatttaatatttttaggaaacaaaatgttgagaactatctcggtaaagacattaagttctccaaaacaatgaacgccgttgatttaatgtctcttggcgtaggagctgtcatcgggaccggtattttcatcttacccggaactgttgcagccacattaactggacctggcgttagtttatcctttgttgttgcagcaattgtttgtgctttagctggaatgtgttatgcagaatttgcttcagcgatcccagtagctggttctgcctattcatatgggaatatcgtttatggcgaatttacaggctggattatcggttgggcactgattttggaatacatgctatctgtagccactgtggcagcaggttggtcatcatacttcagttctttcattgcaccatttggtctaaaaattccacacgctatttctggtcctatgaatcttaacaatggcgtttattttgacttggtttctgttttaatcattttacttatcagtatcctgttgtcacgagggatgaagaactcaattaaaattaatgtcgtagctgtttttattaaaatcgccattattttaatttttatttttgtaggcttacagttcattaaacctaacaactatcatccgttcttgccatatcatttttcaggagtcatcaaaggagcaaccacagtcttctttgcctttcttggctttgatgttgtttcatcatcagccgccgaggttaaaaatcctaagaaaaatatgcccctaggaattattggcactttagctattgcagctgtactttattttggcgtttcaatcgttttaacgggtatggttaattataccaagctaaacgtatctaatcccgttgcttttgcattgcaatatgttcatcaaaactgggtagcagagttattatcatttggtgctatgctaggaatggctaccatgatgctgacaatgatctattcaagctctcgcttaatctatgctatggcacgtgatgggctattgcctagtgcattcagtaaattagataaaaaacataactctcctcaaaatgccttagtcgctgtcactattattattgcagcaggtgcagcattcttctccgttgatcaactagccaatttggtcaactttggtacactttttgcctttactcttgtttcctttggaattctaaaattaagaaaaagaacagatattgttaacgatggctttaaagttcccggatacccatatttgccaatcatttctggtttaatttgtatctttatgatttgccatttaagttcagaagtttacttaatggcagctatttggttaatcatcggtgctgtaatttactttatttatggctaccaccatagtcagcttgatcatgattaacatcagtaaaaattatgtaaagaaaaagacgattcgcatgaatcgtcttttttagctctgtttgaactagttaatttgattaattgcctgaccatctttaaagaaagacaaaacattattcgcagcttctttagacaaattaaatctagcaatgtgagtagctgaaccaacgtgaggcgtcatgatcacattatccatttcaaccaattcaggtcttggatgcggttcgttttcgaaaacatctaaggcggcgcctgcaattgaaccattctttaacgcagcaattaatgcatccccgtcaatcaacgatccacgagcaacattaattaaaaacgctgtgtctttcattttctttaaaaagtctgaattaaccagatgatatgtttcagctgtagcaggagtatgtaaactcacaaaatcagcttcttttgccaaagtatctaagtcaacatatttagcatctaattctgctgcaatttgatcatctacttgatgacgattatgataaataattgtcataccaaatgctttagcgaacctagcaacttgttgaccaattcgacccatacctacaattcctaaggtctttccttcaatggagtacccttggttgtcgtactcatcggcatttaaaaagacgccttcacgcaaagcatcgtcataataatgcaatctacgagctgatgccataatcattgtccaggcaagttccgccgttggacgcaacacactcttagggcaatttgaaacaactattcctttttctttagcgtattcaacatcaacgtgatcaaagccaacgccataagttgaaattatttttaaatttttcgcagcatcaatcatttctcgatcaaaagccatctttgctacgatcacaccatcatattctgcaatatgatcaagcacccactcacgatcatcttctggtcgatgtcctactggaccgatatcaacttgacaaatattttttaaatcagttaaggcctcatctcttaagccacctaaaactaaaacttttgctttattcattatttttagacctctattcaattttcatcttaaagtaaaaataccactatttgaaagagaaaacatctactttaatattttattgattgcaactgcaacaccgtcgtggtcacaatcagccgtaacttcgtcagcatgttgctttgtatattcaacagcatttcccattgcgatacctaatccagcataagttaacatcggcatgtcgtttgcttgatcgcctagggccatcacattacttcgatctatttttaagtagtcacatagtcttttcaggccagtccccttatcgacaccggcagcggttgcttcataataaaaaggctcagtctttgaaaatacaactcgatctttcatcatttcaaataaaggagattctattttatcatctaaatagtctggatcatcaacatacatacatttgatgattggtatctgcttcatttcttcttgtgtacgatatgagacttctaattttacgacccgtgaattataaattgtataatgtcccaaatcacggctagctgtataaattcgatctaacgatacgctatgaaaatgtaagtttagctttcgcgcaattgtctctaaatctacataatcttcatattttagcccctgtttgaaaataacctgccccgcggttgattctacaactgcaccattaaaactaactacatactgattttcttggccattaagccctaattcatctaaataacgttgagtacctgacaaaggccgacctgtgcaaattacgatttgcttgccttgtttttgagcagtcaaaattgcttttttaactgctggtgtaatctccttcttagaattaactaaggttccatcaatatctatcgcgattagcttaatttcttccattaccttttcccttaaaacaaagaaagcaccgcttatgcgatgctcctattaaacagccatggtctgcgtattttcttttaacttgaccaaatcagccatatcatcagcactgatttcaaaatcgatgttcaagttttcctgcatttctttaacattatcactcttcggcaaaacaatacaacctagctgtaagtcaaatgctaacattaattgagctggactaacatgatacttttcagcgtaagtcctgattcttggatcctttaacaaacgaccatgtgcaagtggagaatatgctttaatctgaattcctaaatttttacattatttcatcaaatcagttggcacatttcctatatgaacttcgatttgattaactactggcttaattgagctgttattaacaatgttagctacgtcttcttgtaaaaaatttgaaacaccaattgatctaactttaccggctttaagtgcttcttccattgctctccagttttccagattgccttcaaagtgacgatcattaattctattcacttcaatccaaggttgtggtgaatgaattaacaacatatcaatatattccaaactaaatcgatctaaagcgtcatcaattgcttttttgtaccttcatagtctttaatcgaagttggtaatttagttgttaaaaaatatcactactctcaacatcagagttccaaataccttttcccacaccactttcattgccatagtctttagcagtgtcgaaagcgcggtaaccaacattaatcgcttgacgaattacttttcgtacatcatcgttattaattagccaagttcctagttgaattcgaggaacctctactccgttattgagcattaaagttttatcagagtacatatatacacctctacattttactaatatgtctctgtttcttaattcctgtatttatatagctaataacaattattaaacaataattgtttttttcagccatctgttaatagcatacaacaaaattgttgcaaatcctatacatacattttattttttgtggttctgttatattttctaattaaaatagtagcatcaatcaatgctgctaggtttataaagattatcaaataatttattttattattctatacaaaattaatattttcgtataaaaaaagaaagggctgatgatgtcctatcaactctttctcttcagtctcttaattcccaacacctataataccagcatttatcatttaaacaaggataaaaaacatcttttacttactaaatattatttttagttttcacattatagttttcatcacatttttaaaaagtctagatgttatattacaaaatgattacaagagcaatataaatcatatagttcactattagctatatgcaaatactatattttttgagcaataagctgcaacaatttttgagcaatctttcgcttactcattttaggccatttcttagttgacttatttttttgtaaaatcgttacctggtcttcatcattgccaaaaacatttttagaaacgtcatttgctacaatcatatcggcaccttttgaagatagcttttttgcagcattttgtagcaaattattcgtttctgccgcaaagccgacaactatctgccctcgctgcttgtggctagcaacttcgcgtaaaatatctgtcgttttaactaaagttagagtcaaagtttgttgatcagcttgcttttttaatttatgatctgcaacttgtttcatgcgccaatccgctactgcagcagccataattaaaacgttactatgcttaaattcttttttgactgcaactaacatttcttcgctactagaaacatgaattaatgtaatcctaggattttgtggcaaaggcatacttacattaccatatattagctttactttcgctcccatcgctgctgcttctgtagctaaggaaatgcccattttcccactagagcggttaccaataaagcggacgggatcgattgcttcttcagtaccaccagcagtaataacaatattttttccttgcaaaacgttctgttgttcagtgaaatttttgatccacgccacaattgctcctggctctggcattcgtcctttagcagcatagccttctgccagcatccctactgcaggctccattatttctacaccatgttctttcagaaaagctatatttcgctgtgtagctggattattccacatttggtcattcatggctggtacaaccaatttaggtgcacttgtagctaaaattgtagtgctagctgcatcgtcagcaattcccgttgccattttagcaataaaatttgcagtcgctggtaaaaccagagctaactctgtccaacgcgctagatgaacatgtggtatgctagcctcattttccttgctccataaatcatccaaaacaggatactttgttaaagctgccagtgtattagtagttacaaaatgctctgcatttttagtcattactatttgaacttgatgacccgctttttctaaatcgcggataacgttaactgccttataatcagcgattccacctgtcatataaattgttattcgactcattttaccattcctcgtcatctaaacttatttttattttatcattgtccacttaaatagtagaatattgtgttgggagttatatttggaggaaaaattgaaaaatatgcaaaaactacttttactaactatattcttacttagcttatcggcctgcactaaaccacaatcatcctctgtaccacgtgataaaagtgccactacaatcaagattgttgataggaagcttgagttgcatcagcccactaaaaggccacttcaacctttaaatggaattttgcctcattggctgcaaatgccagataaatctcagcctaagccagcaatttatactaatttgaatactgttcttaaaaacaaatagggaaatgattagtttcatcttccctatttttgagactgtaaaatagtttgtgtaaggatgaatgattccttaaatttatttctttaaacattagaaaaaggagttcctttctcgtatgattggtttgaacaaaaaaacacatacagaaagaagaactccttcatgaatgattttaccaaagattttgctcaagctctattcaatccagacaaaataaataatttattgcgcaaagagctacaacaggctgttaataacttgttagaagctgaattgactgcctttctgggctatgatccctatgccagaaatggctggaatactggcaactctagaaatggtgcttatttccgcaaagttgatacgcaatttggcccaattgaagtgcaagtgcctcgggatcgcaacggtcaatttcatcagcacacgctgcctgactacaagcagcactcggatatcttgtaaagcatgattatcaagctttactccaagggcgtgaccaccagggaaatagccgatctaattgaaaagatgtatggcagccattacagtccagctcaggtatcaaatatttccaagcagatgattccaaaggttgaggcttatcacaagcgcaagctaagcgacaagtttttctgcatctatttggatgcaacataccttcctttgcatcgagaaacatttgagcgtgaagcagtctatattgccattggcatcaagcctaatgggcacaaggaggtcattgactactgcattgcgcctagcgagaacattgaagtctggacagatatgcttcaaaacatgaaatcccgaggcttaaagcaagttgagctttttctttctgatggtgttgttggcatgaaaacagccttgaccaggacttatcctaaagctcattttcaacgctgtttggttcatgtcatgcgcaatatctgcgctaaagtacgcgtcgacgatcgtgaaaagatcatgaacgaattcaaacaggtgcatcaacagacaaacaaagaagaagccacagctgtcctgcatgacttctataccaaatggggcaaggtttacagccatgttatcagaagcttgaaagacatagaaccagatctgctggtcttttataactatcccaagcagatcagagcttcaatttattcgactaacatgattgaatcatttaacaatgtgatcaagcgcaaagctaagcctaaggcagagtttccaactgaacagtcgcttgatgcttttattggtattcaggcaatgagctacaatgaccgttatttcaatcgaattcataaaggctttggtcaggttcaggacaccttagaatcctactttgattaaataaataattaaaaaatcaatttacgagaaagaactatttacacaaaagatttgacagtttcctattttttgttcaatttacaagttgctttaaaaatagttgttttatattaatgagtaatttaaaatttatataatacagaaaggaactttatatatgccaaatttatccagtgatttaacttcaactattaatgagagactaaacaacttgaccgcatctaaaattcgagcatttgaccaaaaggtctctgaaatttctgggattattaagttaactattggtgaacctgatttagcgacacctgatcatattaaagatgccgcaattcgtgatattcaggctaatgattcccattatgctcctcaagctggtaagccagaactacttgaagctattagcaattaccttgaccgctcaattggtgtacattatgatccaaaaagtgaaatctgtgtcactgtcggtgcaacaggtgcattaaatgatgtctttatgaccttgcttaaccccggtgacaaaattttggttcctactccggtttgggctttatactttcagctaattaaaatgactggagcaatccctattcaagtcgatactaaaaaagatgacttcatcttaacagctgaacatttacgtcatgttctcaatggtcgcggtaaaggtgcaaaggcaattattttaactgatccttctaatccaactggccgcgtttattctgccacagctctaaaagccttagcagatgtcattaaggaatacaaaatcttttctgtaactgatgaaatttatgcagaacttgtttatggcaaagccaaacatcactcactttctgaatacatccctgacagaaatattttgatttccggtttatccaaggcttatgctatgactggctggcgtttaggctatattgctgcccctaaacaaatcatgaagagcatccgcaagattaattcatttttagttacttcagttactgataacgttcaaatagctgctgtcgaagccttaaacaatggtcaaaacgatcctaaaaaagcacgtgaaatctacgaagcacgtttaaactttatgcaatctggcttagaaaagttgggctttgaaatggccacaccgcaaggagcattctacatttttgctaagatccccgaaaaatatggcaccaatgatgaacaattcgcttttgagctggctcaaaaagcaaaagtcggtgtcactcctggtcgctactttggcaagggcggtgaaggttatgtccgtctttcttatgcatcatcaactgagcaattaaaagaaagtttagctcggattagtaatttcgttaataatttataattcagataaaaaaataagtgatctcaattaaagcgagatcacttattttttattatattgatttattacttatcccaagttgaattttctgcagcatcttcagcagccatcttttcaagacgctcttcggttgcctttacactgtcttggtacttttcctcaacttcgatccccaagtcagctaattgttgatcagctactggagctggagcatgcatcattggttctgaagcagaagcattcttagggaatgctgaaacgtcacgaatattatccttatcagcaagcatcattgcaaatcgatcaagaccgatagctaaacctgcgtgaggtgggaagcccatgtccaaagcatccatcaagtaaccaaattgttcatatgcacgtttcttagtgaaaccaagtgccttaaacatattttcttgaattgagcgcttgtggatacggattgagccaccgcccatctcatcaccattcataacaatatcataactacgtgcgtgagccttatgaggttcagtagttagcaacttaaccccttcatcatctggcatagtgaatgggtggtgagctgctacccaacggccaagtccttcatcgtattcaaataatggccaatcaacaacccaaacaaagtcataaacacccttaggaacaataccagtttctttggcaaattcacgacgaaggtggtcaagtgaatcacaacataccttccacttatcagttacgaatactactaattcgccgccttcaagatcaaattccttcttcaaagcttctttgttctcatcagtcaagaagcgagcaacagggcctgaaaattcgccatcttcaaatttaacccaagccaaacctttagcgtggaaacgtttaataaagtcagccttcttgtcaatcttcttacgtgagtattcttttgcaccatttttaacagcaattcccttaacaaaaccgccatcagcaattgcaccggagaagaccttaaagtcactatccttgaaaattgggcttaagtcatgaatcaacataccgtaacgagtatctggtttgtcacagccatacttgttcattgaatcagtccaagtaattcgcttaattggagttttaagatcaatgcccttgacatctttcataattttcttcaaaagaccttcagtataactctgaatagtttcttcatcagcaaatgacatttccatatcaatttgagtaaattctggttggcggtcaccacgtaggtcttcatcacggaaacaacgagctaactggtaatacttgtcaaatcctgcacccattaaaagctgcttgaacagttgtggtgattgtggcaaagcgtagaaactacctggatagattcttgatggtactaagtagtcacgtgcaccttcaggtgatgacttacctaagattggagtttcaatatcaataaaaccattttcatcaaagaattcatgagtagcacgcaaaatctttgaacgtaaaataattgcttgttgaacttctggacggcgaagatcaagatagcgatactttaatctagtttgttctgagacttcaattccatctttaatttcaaatggagggttcttagccttgtttaaaataatgatttcagttgcatcaacttcaacttgaccagtcttcatgtcagggttaacttctgaacgcttaacaactttccccttaacttgaacaacatattcattaccaagtgaatcggcaatatccattaacttcttaccagaatctttgttaacaacgatctgaaccaagccttcacggtcacgcaaatcgatgaaaaccaagttacctaagttacgtacacgttgtacccaaccatagagatttacatcttgaccgatgtatttttcagtaatattgccacaataatctgttcttttttcgatcttttccattgttactagtccttcaattcatccattattttagtcatgttatttagatcttcaagacttaaatcgattgtcttgccatcagctaaacgtttaatattcaaaacgccgttagccagttccttttcacctaaagtaataacatacttagcaccttcacgatctgccttcttgaattggttctttaacttcttctgattgacatcaaagtcagcttcaaaaccttgattacgaaggctacgtgcaatttcaattgccttttgtgcagtaccgtcaccaatattagtaataaagaaatcaataccgcgtttctcgaataatgcaggattttgcttttcaagcactaacatcaatctttcttcgccaatcccgaaaccaacggctggagtagcgggtccattgaattcttctaccaagtgatcatatctaccaccaccaagaatagtagttgcactttcccataagctcttatcttcaaccataaattcaaagataattccagtatagtaatcaagtccacgtactagatcatcatcaattacataatcaataccaagttgacctaacatcttcaagattgcgtcaaaattagcttttgaatcgtcatccaaaaattcacgaatcttaggtgccttaggcaagaacttcttatcacgttcatctttagaatctaaaatacgcaatggattatcacgcaatcttctttgtgagtcttctgataactcatctttcaaaggagtgaaataattaaccaaagcatcatgataatcttgacgtacttgctcattccccaaagtgttaatgtgaagttggtaattcttaacgcctaactcacccaataaatcatgtcccatcatgattgtttgtacatcacttaatgggttgcttgagccaaagctctctaccccaatttggtgaaattcacgttgacgaccggcttgtggtctttcatatctaaaagttgattccatataaaaaacattaaatggcttaacaacttctggcgcatacatcttgtcttctacataagcccgcactacgcctgctgttccttctgggcgaagggcaatatggcgaccacccttatcatcgaagtcgtacatctgtttttcaacgatttctgaactatcgccacttgaacgagcaaagatttcataattttcaaaacttggtgtgcgaatctcacgataatttgcgcgattgaagaaatttctggcagtttcttcaactttttgccatgaaccagattgatcaggcaaaatatcaactgttcccttaggtttttgaactctcatttaatcatcctttttatattttgataacttgattaaaaataaaaagcgcccttgaacttaatcaagggcgcttagattagcacggtaccacctttttggttgctgcgattaacgctcgccaaacgatccattatctgttaaaggtgtcacagaccgcgatctatctactctctcaccacaacgagcagtctctttgaatagatcattgctaatccacattctttgtcatcgataattcttacttagcttatatttttctcaagacattgtcaacctttgcggtctcattttttcgctaaagatctaacacaatcgtgaatggaccatcgttttctaaactaacttgcatgtcagccccaaactcaccagtctcaacgtggaaaccgtcattttctagttcttgattaaagtcttcccaaagttctttcgatcttggtggacgcatcgcatcaacaaaactaggacggttgccttttttagtatttgccatcaacgtaaattgtgataccgacaaaatttctccgttaacatcctttaaagacaagttagtcttcccctcctcatcttcaaaaatacgcattttagctattttatcagctgcttttttgattactggcaattcatcaccatttttgatgccaactaataataaaaagcctttaccaatcttgcccacagttttaccgtcaatatctacttgagcatgatttactctctgaattacaactcgcattaattatctgacctcttagtttcgtatacgtctggaatatcacgtaatttactcaaaatttcatctagttgatctgcatcccgtacagcaactgtgacatacatatgtgcaacattatcttcgtttactttaccagagatattattaatattcttagtaagtgagttcaacttattaataacgtcactaagcagattggaacgattgtaaccaaagacttcaatatttgcattaaaggattgaacactattttcctcaacattttcccattcaacatcaattaagcggccttgttcttcagcttctttggtgatattacggcaatctgttcggtgaatagttacaccgcgacctttagttacatacccaataatcttgtcacctggaactggattacaacacttagctaaatgaagcattaagtcactaacgccttggatcatgacgccatttttatgcttaaccttcattgtagtatttgaattcttcttaggttgttcttcttgaactgcttgttgtccagaattcaaaatcttttcttccagctctttttgtttttgattttcttcctcacggcgcaaatcaaccgtcaagcgattaaccactgcttgagcagaaagatcaccaaagcctactgccgcatatagttcatctgcagtgtgataattaaagtgctctaatagcttttcaattcgatccctggccataaattctttgggtgaaagatcctcatcgcgcaacatatcagcaatcaattgttcaccatgctggatgctatcttctctatcctgacttctgaagtagcgtctaatcttgttgcgtgctcttgaagtcttcaccatgtcaacccagtcacgcgatggcgctgcattagtctgtgtcataatttcaataacatcgccattgcgtaatttatagtccaaaggaactaatttgttattaactttggcacctactgcatgactaccaacttgagtgtgaattgcataggcaaaatctagcgtaaccgaacctttaggtagttcatatacttcacctttaggcgtaaaaacataaactctgtctgaaaaaatatcacttttaacagacttcataaattcaccggcatctttagtttcatcctttaattcaaggatttctcttaccatatccagcttttcaccagaggtactttgctcaacaccagtaaaattgccacgcttataagcccagtgtgcagccacaccatattcagctactttatgcatttgttcagttctaatctgaatttctagtggacgaccgccaggcccaataatggttgtatggagtgattgatagccgttaacctttggcatagcaatgtaatccttaaaacgacctggcattggcttccattcagtatgaacagcacccaaaacagcataacaatcacgcacatttttaacaattacacgtacggccaataagtcataaatctcatcaaaatctttatgcttattaaccatctttttatagattgaataaatatgcttcggacgaccataaatttcatatttaatgcctaattcatttagagtcttcttcaaagtcttgattgtatcggcaatatatttttcacgctggcttcgcttgacatccatcaagttaacaatgcggtaataggcttcgggatttaagtagtggaaagacatatcttctagttcccacttaattgtcccaatacctagacgatcagccagcggtgcataaatatccattgtttcggaagcaatacgccgctgcttatcaggtcgtaagtgttgcagagtatgcatattgtgtaaacggtcggctaacttcaccataattacacgtagatcttgagccatggcaatcaacattttacggtgattctcagctaaaaattcttgatgagacttgtactcatatttgtttaacttggttacaccatcaacaataaaagctacatcttcaccaaatttttccttcagctcatcatttgtaactggggtatcttccactgtatcgtgcaaaaagcccgctgcaactgtatcaggatctaagcctaatgtagctaaagttccagccacttgcgttggatgaataatataaggttgtccagacgcccgtttctgtccagcatgagctttattggcaaattcatatgctttttcaacaaaggccacctggtcatcattcatatactttttgcaggtatcaattacctgatcatgcgtcatttcaatgtatttggacattatgatcatcccctctagcggtaaatatttttattcattaagccaaaagcttcaattattaagtaaattaaaccaaacattaaattatacaaagcaaaatgtggcaacattgctaagcagaaaagcacaggtaacaagaaaatccaccacttggacaggttaagtttaataaataaattgcctagatggtatgcaatgatgctgttaataataaaaaacagaattgcttctcgccacactaccggcacacggcaaatgctaaagatatacggcaaaatcattaccaaaatactccaccagacaagtgacatccagcgatgagaattcaacttcctgacaattggaattgcttcgattttatttcctagttttttcattaaaagattgtgcctctcatcaaagtttaatttaattgataatattttaccatatttatttttcttttctagtaattgctagtccaatccagcgaccttgacgcatggttaaatcgaccttaaagccattctcgtctagagccttttcaatcttaggcaattgcaggtagtcaattccagaaaagataacttgaccatcgtcgtttaaatgactatccatttgtggaatcaagtctagtaaaatttctgccaaaatattggcaacaatgatgtcaaacttgcctttaacatcagctaacaaactagtcttttgagtgtgaatattattaatatcgtttaaggctgcattttgtttggctgcagtcattgattcatctgaaatatctgtggctaaaacgtcagttgctcctaattttgatgcagcaattgccaaaataccggaccctgtaccaacgtccactacattcattggcttaaccattgctctctctaggcccatcattgctaattgagtagttttgtgatttcctgtaccaaaagctaagcctggatcaagcttaattaattgctggtccttaaaagcgggtttgtaatcttcccattcaggcacaattgccaagtgacgtgaaaaatcaatcacgtgataatacttttgccatgccgtgttccaatcttggtccttaatgtatgaagttgtaattttggcatcccctacatctaggccatagctcttcaattcctttaacttatcttggaatttttttactaatgcgtctttatctgcttcttcatcaaaataagcatagaaatatgtatccttaggtaagtctttaatgtcatccatttcaactacagtagaatcatgcaaccagcctgcttgctcaaagtcgctacgctttcttgattcaatacccaatgcattcagattatctaaagcaaaaacgctcaaagcgtcttcaacttcatgactagtatcaattttaataattagtaatttcattaatattatctcctttgggattttcttggcataatgctatcatgataacaggtgataaatatgtcaaagaagaaaaataaaaagaacaaactcgaaaaaacattggtcgaaaaaatcttagaccaaaataaaatcaagtatcgtcaagctcaatttgctgtctccgaagataaaggcggagttgcacaaatgaacacttctattttagaagacaaagagcgtttagtctataaaactctcgtctgcgaaggaaataaaactggtccattggttggtgtcgtaccagttactgaacatttaagcatgaaaaaattagctaaagtttctggtaacaaaaaatgtgaaatgcttcccttaaagaaattagccaaaacaactggttatgtacatggcgctaatactcctatcggaatttattttaaggaaaagtttcctatctatttggatgactctatgcaaggaaatcctgaaattggtgtttctagtggtgaagttggccgcagtgtctttttgaacccagaagacttagccaaattctgccatgctccttttattgatctaaaagaataaaaagcgcttacaatttattgcgttattcttcttcttttgtgttatagtaaatatatgtaccgcatacagaatataacaattacatagaagaagatgacaaaaatgaatatattgttaggaattattggctttgtagttaccatgatcgctgcctttgttgttacggcattagcaattgccaagtaaataaagcgaaaaaataataacagatttaaaatgacgtggtttgatatcatgccattttttattttctatataatagttatttattatcaaattataaatatttaatatataaggctaaactatttatactaaaaagaaagtttttgcctataaaaaagtcaaatttatatcagcaatgttatttatttgtgctaatctaatatgttgtcaaatgtaaaaagaacacattgataataaattgtaaaagactcagtcttttacgttcccaaaagaaggtttagataaattaaacacaaaaatgatttgagcttcaatacaaaatttaatggaaaacaaaaatttggttttagaaagttgtctgttggtttagctgcagttgcacttagcactacttttttcttaagtaatagtcaacttgttcatgcggatactaatactgcgactaatgaagaacaaactcaacaagattcacaaaaatctaatcaagaacagtcaaataataccatccagtcaactcaagctgatccaagtaaccaaaataatcaaagttcagctaaagattcaccaaaccaagaaaaaacaaaacaacaaacagtcgaaattaccgcttttcatacagatgaaaaaggtaacaacgcttccgaaataaaaaaagatgaatcagcttctttaatggctggtcaaggattgcttaaagagaccaaaacattctcatggaacggccaaattaaaggtagttctgacagtgaaactgaacaaactaaaactattagctacgtaattaaccatatctacgctaacggaagtcaaaaatctaacactccatttgcatctgatgaagtcatgctcaaacttaaatctgaagattcgggccaaagctggactcaatattctattgataatggcaaaacttggaacgctttagcccaagcatatactgtcacagtttctcctaataaaaacgctaatgcaaaatatgtagcagacttagttaatattgttactcctgataaaattagactcaataatcaacaccaattcattattgcttcatcaactccagacggtactcactatgaattaactattccctactacataactcaacatgcagatgtcagattttatgatgacactgataaaaccgatcaagcaatcaataaactacttaacgataatgggtttcaactctcaatgactagtgatgaagctggtcaagggcttagtgctgattaccaaaataaagacgaccaatcagctaatacccctattcaatttagcagggtagaagaagcattagctttatttaaaaataagcactataaaattgaaaaagtttctggcgccaatgccacattaaaaacggacagcagtatcggctttggcaactttgataataatgaaaatgtagatcaacacttcatcatttacttagttcatgaaacgcagatagaaaagcaaactgctacagttagggaagaagtaaaaggctactatgtaaacggtcttaagagccaaaacttttccggtataaataatccagatgtggctgttcctaaaaatgatgaaacacctactccaaatgtagtaaaagaagttatttactctagaagcagggttgttgatttagttaaggatccgcaaggcacagaaacaaactggtcacaatgaatatcaaacaatcaagcattttcagctattccgtataacaatactacaattaaagacataattgatggccattatcatttagataaaaatggcgtggttcacattgcttcttcacagaataaacgtactgctacaagcaattcaattactgggatttccgcaattgcacctaattcggagtttttagcttcaattgcttctaccacagttaatggtcaaaaaacaacaactggcaatctagcaactattagcatttgggtaccctatagttactccgcttctaaaccggaaccaaccccaactcctattcctacacctgaatctgagactccgactactccagaacaaccgaagcagccttctgagccaaataagtctgaaccacctaagtctaatgaatacaaacagacaaagattcacaaaaaagtaaattggaattctagcagtcatccttatggcactgatatgcaaagacagaagcaacacaaagatggaattattccaccccatggaactgccattaataatattccaaattcaacaacaaagactagaactactaataatatcgttaagtcttacaataatattagttctaaattaccacaaactagtcaaaataattctaacctgagcttaatcggtctagctttagcagcactaggactactgggatttactattacaaaaagaaagcatgattaattaacaatagcaaactaaaagagacagacaaaaaatccgtctcttttttctaccttaatttatttaatctgcatgtctccacttcttatcagttaagatacgtgcagctaaaagacctaatagcaaggccacgacaatcatcaacgcttctacgatccaataagctccgatattaatattcgtgattccaaagttaaatacagctcgatacatgtaaagaccaggcaccataattacaattgatggaacagtaattgcaattcttggaaaaccaacttttttccttacaatacttgctaatagaccagctgttaaagcaccaataaatgctgccaaagctggagcaacctgagcataatcgaccaagctaagacgtaatgtatttgccattgctcccattaccgcggctgtagctgccatttgtggtcgactgttaaacataattgaaaaaccaaacaccccacaaaagctagccagcaatcgcaagcaggttaaagtccctggatcaatttttaacttaggcatagatcctggatgcaaacgcaaaattgttgctacagcccagcctgccatcgttgcaattacgataattaaaatcgcataagtcagccgttcaagcccagagcgcatatctaacttagacatgtccaatccagatgtaataaatggaaaacccggaattacgaacaacatggcaccaatatagccataggcatgatcatgattaatgtggaataatatttctcctacatgaaaactcataaagtaaacactgcaggctatggcaaccgcaaccgcaatcttggctaccaaagttaacctgtgcttacccataattgctctaatatattgaccgcaagctgcacccaagaaagcacagatcacctcaggaagaccgccgcctaataagaaaataaagccgccgcaggccaagcctgaactaagtcccgaaattaacggagaatacgctgacttttgctgagaaatctcccgtaagcgtttatgaatttgaccgatagtccattccccatgtcccttttcaaattgccgaacgaatttttccatttcattcaacttagtcatattcacacctgttgctggtaacgataaagtctgggaatatgattcattatcaacatcaaaacaggtatattcaattgacactaatccaatatccgttgaacaggtaatgcccaaggttctggcaaccgtatccattgaatcacgtactcgccaagcacctgtaccacagcttaaaagcataatacctactcgacctacaatcgaggtcttttcaactaatgttgcatcctgcgccatcgtattattatcgctcttgaaaaattcctcccacagaatcttcatatgatgtttttctgataaatgatgttctcgatcaatttcactcatgctattattactttccctcacatagttcgcataattataaccattatattctaccacaggaacttcatcataatttttgatattttaaaatttgctgctcctttttattattttaaatttataatagacatataagttattttgaaataaaggatgatttaaagtggctcaattaactgatgaacaacttgctaacattgctcatgacttttaccttagtcagcttaatattgctgatatctcacaaaaatatgatttatcgcgatatttaatcgctaaagcactagaagacgcgcgtaaccgtggaattgttaaaattaaaatctcgcgtggaatcaaacgcaatcaggtactagagagagaatttcagaaaagattcagattaaaagaagcttttattgtcgaaactaccggcaaccgcgatgaaaatagtgaagccgtagttaacttcgctgctaaacaaattgaaacctatctaaagcaagcaaaaatcgctggtattagttggggtgcaacaatgcatggcgtgatcaacgacttttttgagcaggacttagagcaactttactttattcaattacttggtcaaccaattaattctaaccgcaggaagaatccattggcccaagatgcagcagaaaaattgcattcccatagtctaagtctgccaaccccactttatatactaaatccaaagatcatgcctgccttgaaacatgagccttattttaaagtaattgaaaattgttatcatcacttagacatgcttttcactggtcttagtactttccaatcatttcaagctaatcaatttttgaaagaaaattatggacctgaactatttaaagacattcctgactgcgatgtagctggaatgatcatgggacgaccatataatattaaaggtgaatttttccctgacttcgaacaacacatttgtggtatcagcatgaatgacattatgaaaacgccaattcgtttttgtgtcgtccgcaatcgctttaaatctgaggcactccttggcgccttacgtagcggtatcattactcatctagtaactaatgatgcaattgcccaacgcgttttgcaaaatatcgattaattcgctaaagtaatacagagatagactatttataatgaggagaaaaaatgaaaaaatctaaatatgatttatggattggtgcactgaacctgatcaattgtgtgttattcattagctcttggtttgccatccttggagctgacttcactgctagaatagctttaatattttacttatttgcctggttcggcgtgatccttaatgccgttgcagtagtgcaatcgcataacatgaatatctcaccaattgggccaattttaggagtaattggtaatgcactatatggctttaccgctgctctagccttacctgctgtgattgttaatattatttctgccttctttatctttatgcaacatagcaataaaaaatagaaaaagcagccaaaaattggctgctttttctatgctaaaatttgttatgtactggttaacaattactaaagttggatttacaatgactgggaggtgagcattatggagtttagaattgatgaatgtattccagatgttgtatcaatgatggctttagcacaagcaattgcaaattttgacctcaatggtaaaaagccacaagatgtgaacctaggaaggatggcaaatgtctaaagtttttcgaaatgacttaaaaataaaggacatccctaatcaaagaaaacttagggatgtctttttttagcctaaatatgaaattgctacttgtaattgtgccagcttcattgccgcctgagccacattcttgcgatcaacatcaacaaaaatttcacagtgtttttcatcaaattcataacctgaccctagcgcaatatcttccgcagtttcatataactctttatcttcctcattaggatctagcttaaatagaattcgtccgccatcactaacgcggcaatgatcatcggcttcctcaacccaaacatatacggtatcgccataagaatcaatcatcattgtggcaatctgcaatgtcctatcgtcaacccaaattgtcttggttaccttagcaacatacgaacctatttcatggttaattttctttaattcatcctgcttcattttttacctctaatttataaattcttttctttaatataaggataccctcttagcaattcttctacaaatttattaaatagattggatctcccaatcagcttgactgttaccgcttactaattataccttgtaaatatactaaattttggagaaaaatatgcatactaagggtttatcagttaaaaatgttgtagcgatcggaattggatcggcaatctatgttattttagcacgtttcacatcgattcctacgcctattcctaacacaaatattgaattagtctttccttttttggctctttttgcgtcaatctatggcgctaaggtcggttttattgtcggctttattggacatgctttgtccgatttcattatgtacgggcagacttggtggagctgggtattagctactgctgttttaggctggatcatcggtttagcggccaaacgcttagacttaaaaaatggtatttttggtattaaacaaataatcttttttaatatcattcaaattattgccaatattctcgcctggattgtagttgcaccaatcggtgacattatcatctatagcgaacctgctaacaaagtttttgtccaaggaatttcggctacgctttctaatggtattacaattatggtcattggcacgctcctacttaaagcttatgctggaaccaagattaaaaaaggcagcttgcgcaaggaggattaaacaatgcctaaaacaattattgaattcaaagatttttcatttaagtatgacagtcaggccgagccaacactaaaacagattaatctaactatcaaacaaggtgaaaaattgttaattgctggaccatcaggttcaggtaaatcgaccattggccgctgtattaacggcctaattcctaatctagatactggtgagatcaccggtgaatgcactattaacggcaataatattaaagacactaacctatttgatctttctttcaccacctcaactatcctacaagatactgacagtcaatttatcggcttaactgttggtgaagacattgcttttgctttggaaaacgactgccaaccacaaaattatatgaaacaagttgttcatcgctgggctgatgaattagggattgagcatttattaaagcaggcgccacaaaatctatctggtggtcaaaaacaaattgttgctctagctggtgtcatggttgatgaatcaccaattttactttttgacgagccacttgctaatttagccccagcttcaggaatgaaaacgatggctttaattgatcgcattcaaaaagaattaaatgctacagtaatcattattgaacaccgtctagaagaagtttggagtcagcctatagatcgcattatcctaattaatgatggtgaaattgtagctgataagaagccaaatgatctattacatgagaattgtttagaagacgttggtgttcgtagtcctctttatttaaatgccttaaaaaaagctaacgtcgaccttacgcgtattcccgacctaacttcagtcgctgctttgccccaagatcctgaaattgctaagcagttgcaagaatggcaaaacaacattaccctaagtggtgaaaaagaagagactcatcctctattagaactcaaaggcgtcggccaccgttatagtaaattgcagattcatcctttacatgacgttacagcgacaatcaatcaaggcgattttgtttcaatagttggtcaaaatggtgcgggaaaaaccaccctttgtcgaattatttgtggctttatcgacaatgagggacttattttatttgatggtgataaccttaagcagttttcaatcaaagagcgttccgataagattggttatgtcatgcaagatcctaaccagatgatttcccaaaaaatgatttttgacgaagtagctctaggcttgcgtctacgtggttatgatgagcagactattcgcactaaggtctatgatactttgaaagtttgtggtctttatccgtaccgcaactggccaatctctgctttatccttcggtcagaaaaagcgagtcacaattgctgcaattttagtgcttaatcctgagttattaattcttgatgaaccaactgcagggcaagattggcaaacttatactgagatcatgaactttttaaaacagcttaatgatcaaggcaaaacaattatgattatcactcacgatatgtacttgctgatggaatacactaacagatccctggcttttgctgatggaacactaattgctgacacagatccaatcaagttattaactgaaaaagctttaattaaaaaggctgctttgaagcgaacctccttatataatctcgctatcaaatatcaattagaaaatccagatagctttgtccgcgcctatattgatgcagaaagggatgaaaaacatgcataatgaaagccaagttttaggttatcaacctggtgattcttttatttatcaattaaacgcaaccactaagttagtttttatgctcctagtctcggttgcttgtatggtaacttatgataccagattcttaattgctatctgtattttatcaattttcttgtttaaagaggcaaaaattaagtggagtcagatttcttttatcgtgaaatttattgtagttttcatgttgctaaatctgatttttgttttcatctttcagccaagctatggtgaaaatatttatcattctaaaagcatcttgatccatgccggctacttcacattaacattgcaagaggtattctacttattcaatcttttcttaaaatatgtctgctcaattccaatcgtattgctgtttctattaactactaatcctagtcaatttgctgcttcattaaataaaatcggcattagttacaaaatttcctatgctgtttctctagctctacgctacatcccagatatccaaaattcttattgggatatctcagctgcccaacaagcacgtggcaatgaactatccaaaaaggctagtttaggcaaacgaattaaggggacattgaatatcgtgatgcctcttatcttctccagtttggatcgaatcgatacaatttcaacagccatgcaattacgccgctttggctcaaagaaaaaacggacctggtatgtcacccaatcatttaaaaaagctgattatcttgtaatgatcgcagccgtgattttggtattaattgtggttggtctctggcaacttgatcatggtagattttataatccatttatttagaccaaaattaaaaggacctaatggtccctttttggttttcgatttttctgtttatgatcatcttgagtgacaatctcaggtttcttaggaatcggcggcgtgattatttcataattatgcaaacggtgttcaagatagtcatctaatcgctcttgcgtattttcatgtacaataatcattaaatcgcctcacttttcataattatacctcaaaaatgtaggttaaacagcgtaattactaagtatgtcattccactagcaatcacaggacctgcagctacacccttgaaaaccactactccaataatagtacctaaaactaatgcaaccgtcacctgtggcaccgctgctaattgatcaacaccataacgtgacaagatagctacagcaattcccgctaaaatggcaatccatccagctggcgacttaaaagttttaatcagatccttaaagccaatctgtcctgtcgcaataggaactagaattgcaaccgaaataatagttacgccccaattaatcccctttgcttgaatagtaggcagccatttactagtaaacggtaataatttaaacaccattaccactcccgttgcaataattaatgacatgtttttacccaataacgctacaactagcaccaatgctagaaataaccaactttccatatttatctcccctcaaaaaatcattagcattagttcactttaacaaaaatattcatcaaaacaaaataatgagtctaaataagtgaaaatcaatctaatttgtgtcataataaaattactcagaaaaatatatgtatacgcgcacctcgttcttaaaacgaggtgtttttttacgcaaagaaccaatgcagatatttcacctacactggttcttcttagttgaccgatattgcgatgtgactttactactgcatcgtagttagaatttgcaaatatttatgcttgaaaataaaatatttgcacaaataattaaaaaacgtttcttgcaaaaatacaacttaacattttaataaaaacaaaaagatgccactttcgtgacacctttgtgattacttattcatacatttcgttttgaactaatccctaacttccttaatggtatcaatgatagtaccatcacgatactcaactaaggcaaccgtacgatcagtatattcaagtggctttggtacaccaacttgtttttcagccattttttgcaattcattaatatccaagatcttaagtcctggcaccttactaaaggcatccactaaatcctggcgagctggattaatggcaattcctctttcagttactaaaacatcaattgatgaacctggagtaacaatagtttctactcttggaacaacagtcgcattacgtccccgaacaagaggagctgtaataatcgtcatcttggcaccagctgcggaatcttggtgaccaccgacggctccacgaatgacaccatctgagccagtcataacattaacattgaagtcagtatcgatttgtaaagctgacaagattgaaacatccaagttgttaaccactgcacccttattatgaggatcagcataccaagaagcatcaatttcttgttgatttttattgttagccattgattgggcagcacccttatcaaagtcctgcacatccataacttttctgactagaccttcttcaagtaagtcagtggtaggtttagtaataccacccaaagcaaatgatgcagtaatgccatcatcaatcatactttgacgtaagtacctggtgacagctaatgcagcaccaccagaaccagtttggaagctaaacccttgcttgtaatatggagagttaatgattacctggttaaccatttgagcaatcttgagttccttaggatccttgggaaagcgagtggcaccagaaccaatcttgtctggatctccgactttatcaattttaaccacataatccacttgatcttgctgaattgacgcaggcgtatttggataatcaacaatattatcagttaataaaacaaccttattagcatagcgagcatccattagggcatagcccaatgagccgaagacagcatccccatcttgaccgttagcattacctgcgggatcagatactggcacacccaagaaggcaacatcaaccttaatctcgccttcttcaattgaacgagcacgattaccatgtgagcggaaaattacaggattcttcaagccgccatgtgaaacaaaatcacctagtgaaccgcgcatacccgaagaagtaatattagtgattactccctttttaatcgctccgataactttatcattcataacaccagtaagtgaacttggagccaaggttaaatcctggtaacccatactaataatcttgtccattaccaagttaaaaacataatccccatttctaaaatggtggtggaatgaaatagtcataccatctttcaggttattcttgattacctcatcaagtgaatcaataatcttattttgtccagtagtaactcttacctttggagcaacccgcttaacttcaggatgaccaatttcagtagtttcaaatggtttcaaattcatttttttcattaaatcatctggtaattcgcgttttactttattctccaatgtagttaccttctttatcaatcaagttagaagctttcgctgtttccaaaaccctggtagccttttctacaactggcttatcgatcatcttaccattaagtgaaataacgcctgagcccttagctttggcttcacgaatggcattttcaacattcttagcttgctcaatctcttctttagttggattaaagaccttattaaccatttgaatttgacgtgggttaaccaaactcttgccatcataccctagttcatggatatagttagtttcacgatagaagccttcagtatccttcatatttgagaacactgtatcaaaggcatatacgtctgcggcccgagctgcttgtaaaaccatgttacgcgcaaattccaattcgcgaccatctggataacgatgagtatgcatatctgcagtatagtcttcgccagataccgccaagcccatcattaaaggcgttgcggttgcaatttttggggcatttaagacacccttggctgattcgatggcagccatcacgccaatagaaccattttcaatgtcaaattcatcttcccaatgttcgatatcctttaccaatttttgaatcattgcagctgattcagttttaggcaagcgaataacgtcaacgccggcttttaccattgccttaacatcttcatcgtaaaatggcgtgtcttgaccattaacacgaactacaatttcactgccaccgaaatcgactgtcttaattgcctcatagaccaacattctggcagcatctttttccgttaatgaaactgagtcttccaaatcaagcataatcgaatctgcaccataaatgccagcatccttaatcatagctggattattaccaggtacaaacatcatggttctacgcaaacgattcttaacgtatgtcatttagagcacctccaaatctggcttgtctgaagtttcggttgcacgttgtgcagctgctaaagtacgagccttaattacacaatccagtgctcccttatcggttgctttaaccttggcattttctaagccataagcttttaaggtgtcagtaatcaccttttcaatctgatctccataggccttttttacttctgattcaaggtcaatctcaatgccgttagaaccctttgaaatcatgatttggatatctgaactctcaagtgttcccgcaactgctgtggttttaatttccattaatattcattcctttctcaattttagactgcaatttctgcatgttttgcttaataaattcataagtcgtttccggcacgaatttattgatctcttttaaattgccatccttgatcagctgtctaactttagtggcagtaacaatttgaccgtctttttccaagcgatcaattacgattacttcaatctcaggaccaagctcatgcgctaggctaacattataaaagtgagtcgttcttgaaattggttctttaccaatataacgacgggtaatgttcagtcctggtgcaatttgattcttaaagacagctgcgtctatcaccgtttgtacagcaattaaatcgtcaggtgattttaagaagtatgctggaaaagtagctggtgaaaccatgtagtctccgccagagattactttcacattactaaactccttagtaccttcttgcaccaatttgaagcgctcatcaaagctaaacaaagaaacatcattagccacaacaaagacataaaccaaatcgttttcttcactagccatcttaatcaaatgctgatgacccaaggtaaacggatttgcattcatgactattgcagcgaccttcttatgctcttgatctgctatttcgggcacttcagccacaaattccttcacatcaggcgttccattttctaaaaaggctgcctgatccgtcttggctaacaaattgaagtgcaagtgctcaaagctagttgcatactttgctttagtaaagacaaaggaatggaaaattccatcattagtcaaatattgcgttaaggctgtaaccactttattaaagcgagccccctgcgtatcggcatcattcttgactccgatatactttaagacattaccagccacactaccagtaccaactaaattgccttcctcatcttctagcccaatagtatgatcaatcacgttaacttcgcgttcactaaaatcatttaaccccaatgattccaacaagttttcccatttttgcctagttgtagcgtcgtttaaaaacaaatcaacgactttatccataaatatgccaccttgctatttcggtaatcgttttcacaaatatagtttactctcttagtttgattatttcaatttatctattaattttttaaatttttcaaaaattcagcaataatctcatgcgttttttctggttgctcagcctgaggcaaatgcccacattccggtacaatcgccgtttgaacatcttgattcagcatttttatcgcttgggtaaattctggattaaaaaatggcgattttcccccagcaattaccagcatgggaaccggcgtatccaaaatcatgtcacgccaatcttgctccgcatgttcaactaaacagttatagttttcggctggatcatatgggaattcttgatattcctttttagcagccaaaaacattttttcatcaatgtgatggtaaaaagccttgccaaaatcaaatttaagcatgtcaggataattatcccaagttaggtctttaaagccatacttccagctcttatccgcaatcatctttggtgactggtctaaatcaaccattgcctttagtctacctttgccataaattgacaaatatgcccaaatattggcggcccccatagaatttccaatagctactacatcatgcaaattgagcttaactaatagctcctctaagtcaactgcatgacgactaatccgctgtccacgataggttcgttcggactgtccttgattgcgtggatcaagcataataaaacgataatcatttttaaataaggcaattaaatcttgccacatttgacaagatccccctatacctgggatcccaatcaaagcaggcttatcttcatcccccgtatcggtataatgcaaaattacatcgtcattagttttaaatttcatctttaatcttctttcattttgattactcaattctattatgacgcaaaaaaagcaacctggtgattcccaatgtcattaagttaagacattgacaattaagggtgcttttttagagatcgaatcatttggattcgatctctttttttgtataaaataaaggcgaaaagaccagccttttcgcctatcttatatattatatattttaaaccttcaaaattattgccagaaagatggtgttaattatgaaagcccttcataagaatattctagaacgtcttgatcaaattatcaataatactggggatcatattcacgattttattaataatcctcatgcttttaccaggaaacgcactttagatgcagcgacagtccttaaaactacaattaacatgcaaggtcagaatttaaacagtgaactctttagagcttttggcgaagatgcaactaaaaagaacgataaagtagttagtacttctgcctatgttcaacgcaaaagccagctttctcctgcttgttttaaacatattctgactgtttttaatcaaaatctatttaatattcaactttttgatcatcactaccgtttgtttgccattgatggctctgactttaatcaaatctggaatccgaaatcgaataacattgtacaagcttcttctcataaaaagaaaccctattgtcaaattcacgttaatgccttatatgatctattgaataatacctaccaggattgtatttttcagcctaaatcagaaatggatgaacgcaaagcggctgttcaaatgcttaaagctttgaattgtggtccatatattgtaacaatggatcgtggctacactagtttcaatatgattgaaaactgcaatcgcctgcctaactgtcattacataatacgaactaaggctggacaaggcggagttaaagaaataacgacattgcctgatcaagaatgtgatcgtgagatttcctgcctggtaactacttctaactattactacatcacgcataaagccagtgagaatattcaccatgtccagcatcattatcgccaatatattaagtatcgctctaaaaatacccaggatctaagctgggattttggcgagttatgcacaataaaatttcgagcctgcaaatttagaattaatgatgccaaatcaggcaaagaagaatgggaagttgtgctaaccaatcttgatcgaaaaaattatccgctaaaaagaattaaagagctttatcatctgcgttggggtattgagacctccttcaagaaattgaagtattctttaggcagtgtacagttccattccaaacaagataaatttattgaaatggaaatttatgcccatatgattatgtttaatgcaatcagtcaaattgatgcacaggcctatattccgcaaaagcattgcaagtatcaatatgccatcaatttcaagcaatcatgcttgattattcagagcatgtatttggcttcttctttaacgcaagattttgaacggatccttattcagatcagctattataccattccaattagaccaggccgcaaggacaagagaaatattaagcccaaatcagctgtatattatttatatcgcgtagcttaaaaaagcagaatctgtgctatgccttatttgttgtacgaaaaaagcaccaatttaaccaattaaatgttaaatcagtgctttaaaagtctaatattaattgtcaatgtcttaacttaatgacattgggtgattccagattgcttttttttaccataaaccaataatcttcatccaaagaactccgacagttccaaaaataatcatatagattaatccaaggacaaaattcatcttccaccattcaccttgtttaacatagccagtagtagccaaaattgtggcaggaccattagcatagtgagtggttgatgcgttgattgcaccagtaaaggctaaaagcattgcggaaaggcctaaaggagcaccagttgcaaccgcaacagacaagaatggcaaataaagagcagtcatatgtgcagttccacttgcaaagaagtagtgggtgtagaacaaaagcaaaactagaattgccaatacaaagccccagctaacaccatgaagactattttgaactaatttggagaaccaatcaataaatccgtatgaaatcagcttaccagccatgaacatcaggatagaaagccaaatcaagatattccaagcaccagtttctttcagagcatcctgcattgttaacacaccggtaatcatcaaaatagttacagccaggaaggcaacaaaagtcgcatctaattgtgggatcttaaagaaactagacaaaacccataaaacaattgaaagaatgaagactgacatcataattttttctggagttgacattggtcccatttttgctaatttttcatcagcccatttcttagcatctggagtttctttaatctcaggtgggtacatcttgtaaataacaaatggaatgattactgccaatacagcaacaggtacgattgcagtgaaaaaccaacctgcccaagacatttgatagcccttttgtgcggctaattgttgagccaccatgttaggagcagcaccggtaataaacaaagccgttgataaaatattggcatgaaaggcagtaaagtcaatgtaggcaccaatctttttacgagaagcatcatctggcttagaatcgtagccttcttttgaaacagattcaacaactggccaaacgaccccacccgtacgagctgagttcgatggaattaaggcaccgagaattaattccaatccagtaatcgcataaccaatacccaatgacttcttaccaaatttttgaatcataatataggcaatacggttacctagacctgttttactaataccatgagccataatgaaggccatagcgattaaccatgcagcagagttaccaaatgaactaagcacgccttgattaactaccataccttttgcatttgtaacgtccttcattggtgctaagccaactaaaacagttactaccaagccagctaaggttgtaccaccaattggcaaaggttttgtaatacaccctacaattgtggcaacgaaaacggcaaacatttgccatgcctgaaccgaaaggccacttgggcgccatggagtaatacaccacaatacaattccaacgatcaaaggccaaataaagcctttataattcactttttctaaagttttcataagaatcccctattctctatggacgatacacatcatcaatgatgtcaaagcctttatctgctaagcttttatctacccaacttaaatcaacttctcctttgctaaaggcaattgctttagcctcatcctgctcatgaaaagcttgtgccttaggcaaaatctcaggagcatctttacgtggaatacaaattactccatcagcatcccctaaaatcacatcacctgggttaacactaacattcccacaagcaacaggtacatttatttcaccaggtccttctttatatggtccacctggggtagtactggttgcataaatcggcagtttccaatttcttaaattatcaatatcacgaattgggccaccaattacaatacctgcaattttcttttgatcgcgtaagtaagacatcattacctcaccaatcaaagatctagtgttatcaccctcgtcgtcgatgacaatcacatcgcctggctggcaatactttaaagccgcataaattgctaagttgtcacccgccctggtgtgaaccgtaaatgctggaccaaccatttcctcatcaggattcgacattaacttaattctaggattcatagcacaatttcgttccatgcaatccgcggtattagaagctgggatctttttaaaaccagctacaacttttggatcaggcatttgcctctttaaataaattctttttcctacaggcatagagtagctctcccctctttatgctccctaatctatcttgttattgttaaacaagcctttttataaaaactaaaactcatcacaactcacaattagtattatacacttatcaacagattaagcggttacaaattttgaattattttgattttttacttattttttgaattatttaaactcaaataattatgcaaaaaaagtgtctgggaaaaaactaattctcagacaggaaaaaagaacgatgatttcctaatcaatgtcattaagttaagacattgacaaattgaatctaatctctgtagaaccgaatcattatgatttggttctttttttgcataaaataaaggcgaaaagaacctaccttttcgccctctgattaaattattaaaccttcaaaattattgccagaaagctggtgttaattatgaaagcccttcacagaaatattttagatcgtcttgatcaaattatcaatgatactggaaagcatattcatgattttatcgatgatcctcatgccttcactaggaagcggtttttagatgcagctacagtcattaaaactactattaatatgcaaggaaaagatttgaccagtgagttgtttagagcttttggccaaaaagctattaaaaataacgataaagtagtcagtacttccgcttatgtccaacgcaaaggtcagctttcacccgcatgttttaagcatattctaactgtatttaatcagaatttatttaatatccagttatttgatcataaatatcgtatatttgccattgatgggtctgattttaatcaaatctggaatcctaaatcagagaatatcgttggaaatctcaatcataaaggaaagccatattgccaaattcatgttaatgcactctatgacctgttaaataatacttatcaagactgcatctttcagcctaagtcaaagatggatgaacgtaaagccgccgttcaaatgcttaaaaagctaaattgcggaccatatatagttactatggatcgaggttataccggctttaacatgattgaaaattgtaatcgcctgcctaactgttattatgtcatacgtactaaaacgggatatggcgcatttaaggaagtagctgagttgcctaatcaagagtgtgataaggatatagcttgctgggtgactacctctaattattattatgaaacccataaggctacagaaaacgttcatttggttaaccatcattaccgtcaatatataaaatatcggtctaaaaataccaaagatggcagctgggactttggagagttatgtacaataaaatttcgtgcctgtaaatttagaattaatgatcctaaatcaggcaaagaagaatgggaagttgttctaactaatctaaatagagccgattatcccttaaaaaggatcaaagaaatctaccatttgcgctggggcattgaaacttcattcaaaaagttgaaatatgctttaggtagcgtacagtttcattccaagcaggatagatttattgaaatggagatctatgcccacatgattatgtttaacgcagtcagtcaaattgatgctcaagcatatgtaccacaaaaaaaatgcaagtatcaatatgcgatcaatttcaaacagtcatgttttgtcatccaggctatgtatataatttcttcttcaactgaaatctttaaaaagattcttattcaaattagtcattacacaattccgatcagaccaggacgaaaagacaaaagaaatctcaaacccaaatcagctgtatattatttatatcgtgtagcctaatttctaaacaagatttgggtttatttggcatgaaaaaagagcattcaaatgcgataaatcgcaaatgaatgatcttaaaagtccaagtcgataatttgtcaatgtcttaacttaatgacattgatttcctaatggatttcatcgttctttttctatactttaagtgccttccttgatattattgaatcaccacaaaacaaaaagaaagaaggcaatcttaatgtatcaaaattataccataggtcaaacagctttaacactcaacttagacttcgctattcctcataatcatttggctaataccattagctggtttgtcgattcaattccagaagatgtcttattgggtaatactgctaaaaccggtcgtccagcttatcatccagcgatgatgcttaaaatcttgctttttgcttattccagaagagtattttcaggcagaaaaatcgaattaatgctggaagaaaacgtgccgatgatggctttggctgaacaccaacagatttcttaccatactatcaataactttagatccagcaagcatgccaatgagctggttaagaaaagcttcctctactttaccaatttgttagaagccgagggccttatcaatgaaggagcgatctttattgatggcactaaaatcgaagctgacgccaatcgctatacttttgtttggcgcaaggcagttgaaaaatttcatgacaagctcaaaggtcaagcggttgagctttatgatgaattgattgccaaagaagtcgtcaaagcaatggcaaaagagaaagtccagaccagtcaaggtttggcagagctagcacaagaaacggaagccgagattgaaaagctgaccgaagaaattgagcaagaacccaaagcaatccctggcggttcgcctagaaaagcaagaagacgcggtcttaaaaagctgcttcataaactaagaaaagactatgttcctcgaatgaagaaatatgaagaggcgaaagaaatctttgcagggcgtaacagctattctaagacagatcatgacgcgactttcatgcatatgaaggaagatcacatgaagaacggccagctcaagccaggctacaatattcaagctgccaccactgatcaatatgtggttgactttgctttataccctaatccaactgatttcagaactttcgaaccatttttaaagcagatgacgacactagacaagtttgacaagattgtcgctgatgctggttatggcagcgaatataattattcaatgttagaagaagagtattcagacaagaagtactatattccttataccatgtacgaaaaggaaaagaccagaaagcatcgcaacgatccgactaagctggctaactggttctatgatgaaaaagatgattattaccttgatcaaaatggcgtcagattcaacttcaaatattatagtcaacgtaaagatcgatcgactggtcaggttcgtgattttaaggtctatgaagcagatgaatttcaactaacgccagaattagaacgcttagccaagactaagagcggacgccaacgtcaggttcgctataatcctaactggcaatacctaaaagaaaaagccaaagcagttctccaaagtcctgaaggcagacacatctacagcatgaggaaatatgatgtggagccgatttttggacatttgaagaacgtctttggcatgcgccgaactcatttaagaggcaaaaagaaggttgaaacagatataggaatagccttcatgatgatgaatttaagcaaatattggaacagaagatggtcaaaagaccaattttctttgttcaaaaataaaaatagacagaaaaagacggtcaagcaactcaaattaagagttggattgatcgtctttcagtatctaagggttagttttttcccagacactttacttgatctttgttattttgatcttattcaccaaagttttcccaaggcattacgtcaacagccggttgatcaactaactcttgcaattcctttggcaaaaattccttcttcacaatcacatcgtaaacatattgttcaaaccaagcttgactcatttcgtagaagcccttgtgaccaaacttgtcgccccatgagttttcaaccttccacttacggatatgaccgttgtcttcatcaacaccgactaaagtcatatcgtgagtagcaaagccctcaccagtattcaaacgatcagccttgctcatttgcgtatcaacgtcaaataattggtcagtcttgtacaattcagtatccaaaaagccagtttttctttccatttgcttcaagacatcgttaccaaagctaactgcttcacctgacttaagttgagctactgcagcttgagctaagtattcaattggcacattcaagtatttgacttgatcgccgccagccacattgtcataaagtggcaagtggtaaaccttgttatattcatggttaggaatgttggacaaagcaacataatcatcgaagttgaagtccttaaagtatttttgaacaaatgcttgtggagtcaaatcacgctccaaatggtacttcttatcatcatcacggtattccaaatcaaatttctttggtggttcacccaaggcaactgataccatgcgataaatttcgttcaagaattccttcttggtcttttctgcttcatccctcttgccttcattaactaatttacgcaaaacaagagcgtcttttctctccttacgagctaagttttcggctaaagcagtagtattattagtattaaagctttctggcattgcatatgaaggtaccacgccatactttttaactaaattaatggccatggtccaaaggccaccatcttcaccggcaaactcaagccatgcttgaacatgacgatcagttaaaggtttatctgccaaacgaataattgcattgtaaaaagcgttagcacgttcaatcttgtcccagaagaaattataagcttgtgagaacgtaaaatccttgaccttgttttccttgccaaagtagtggcgcaaaacattcaaagtagtgaattcccagcaacgaccagaatgcttctgatcagttacaccgccaatatcaagttcagttgaaaagacatggttaagtcgttctgatacgcggtcattaaatgaagcttcaagcaaaccactacgacgagcagcacgagaagctactttattctcaggattagaattaaagctttcagaaaagccttcaatttcttgttgtgaaataactgtcatgatatacctcgttaattcttatcttttaattttttattaatcttttcttatataatactattttctagcttttttgtcattaagaaaaagtcctagtttttgacaactagggcttttaataaaattaatgatcaattaaaggtttatacctgacaaaacttcttgcatcttgtctgctgagttaatcatcttagcatgctcagtatcggaaagcttagtttcaattaccttttcgatcccttcaccgttaataacggttggggtacctaagtaaagatcatgcttaataccgtattcaccattaatcggagctgaaagtggcaaacaaattgcacgattgtccaaaatagctgagacaatttgagtaagcatcattgcaacaccgtagaatgtagcacctttgttggcaatgatcttgccacctttcttacgcacatcggtctcaatttctgctagaacatcatcgttgatttctgagtaatcacggagtgccttaccagcaactgttgattcatcaaagttttcaaaactagtatcaccgtgttcaccaagaaccattgagttaaccttagcaactgggacattcaaacgctttgaaagttcaacacgaagacgcattgaatcaagtgaagtaccagtaccaattacacggttcttagggaaaccagacaacttttgggtcaaagtcgtcaaaatgtcaactgggtttgcggaaacaacaaagacaccattaaatcctgattcaactactggcttaacaatactttccaaaatcttaacgttcttgttaaccaagtcaagtctagtttcacctggcttacgaggaacaccagcagtgatcacacaaacgtcagcatctttagcatcactataatcggctgcaggatgaatattggtttgacccataaatggcgtaatatcttcaaggtccattgaatcaccaacaggacgatccttagctacatcaaaaattgctaattcatcaacaattgtattttgcaataagtcatttgcaaaagttgaaccaacagcaccatcaccaacaagaaatacttttctactcataagttaaattagtcctttcaaatgtttataaactgttttttatctacatgattaattatacactaagcgctttcattagacacgatttattccataattataaattataatacgcgtggtgctagttaaatcgttctagacaataagccaaattataagctaaaattgcaatttccaaccggctttgaaagcctatcagactacgtgctcgattgttctcggcattgtaataggtcagaagcgaaaagtcgctttcaattgttctgcgaatagccatcaattgatgatcattgtgctttttagctcctgtcatatttttacgatatggtgtccaaagttcgtaacccatttgttttagctgttgatgcagttctttgcctaaatagccttcgtcgccaagaagatagtaattagatggatgggtattttctatcagttcaactgtctccctggcatcatgaactgatgcctttgttacgacataatcaagaatgtaaccgtcatcgctaacaatggcatgaactttgaaaccatagaagtaaattttcttggtggccttataaccaatgttggcataaccgcgaaaaattttagcacgatagtttcgaattggttggcaaacaggtaccggaaagctgtcaatgatcaagaactgtccattcaggtcaacctttttattcatttcttgccgtatctgataaatcaattgcaatagctgacgtgaacgccgattaaaacgtgagtgtgataaacaattgaaacattcacagaatcttctttgtgattcaattcctgtcttagcttgccagataagtaaagccaaaatcagactgtccgtagttttaatttgatcaatatttcgccgatgagtaaactcagccggtgcatacaaacgataccagtgccgacaaattatcactaaatctttaaaactaacttgtaaatggtggctaaaacgcttaagcttaaggcagttcaatcagatcagactcttttctattattactatttacaagtcgagtctaacaagattggacttttttattaactaaaacgatttaactagcaccacgcgtattttaatatcccatcaaaatctcgccagtgttattatttctatcgaaaaagagcagttaaccaaccgctctctttacataatctttcttatattatttactttcacgaacatatttagccatctgaatacctgcttgacgaccaaaaataactgtttcggcaattgagttaccaccaattcgattatttccatgaagtccgccagatacttcaccagctgcaaataatccatcaattacattaccattagtatcaagtacttgagtttcagtattaatatgaataccacccatagtatagtgaattgctggatgaacatgaattgcaaagtatggaccacgatccagttcacgatccatcccagtcgttctgccaaattctttatccttaccagttgcaacggacttattccaagcggcaatggtcttttctaagttggcaccatttacgccaatttttttagctaaatcagccaaatcagtaccatgttctactaaaccaatctggtcataaaactcaactgcagcaaaatgagcccgtacacctgagtcaaaaatcaagtatgccccatcttcatgcaaattagtaattgcactagaaacaatctttcgtgtacttaattcattaacaaaacgttgaccattcttgttaactaagatagcaccttcaccgcgcagaccttcaccaattaaataaacatgcggattatcagtatctgcagttgggtgaacctgaatgaagttcatttgcattagttgagcatcaagtgcttcagcaagcttcagtccatcgcctgtagcccctggctgattagtagtcttatagtcaactaagtctggacgatacttcttaatgatatccttggaagcaccaaagccaccagtagctaaaagaaccaccttagctttaactgttttaatgccatctggtgtctcaacttcaacaccattaacgcgcttcttagcatcttgcaacaacttggtaactttagcaccagtaaagatgtcaatacccgcttttttcacctgtgttgtcattcgtgaagttagataaaatccaactggttccattgaagcaggacggtgagcacgtttcttactcatccctcctgtaatggtcaaatcagttaaacgaataccatatttcatcaaccatgaaatagctaaagcagagtggttaacaaagtacttcaacatggcacggtcatttaataaacctccaccttttaaagtttcttcatagaagtcacggttattatcaatgatcccttcgtcaagctgaaccaaagattcagaagcgttcattccacttgaagcacgactagtgttaccaccagttttctcatttttttcaagcacaacaacatttagacctagttcatgagcttgaagtgcagcagtcagacctgctccgcctgagccaacaacgatagcatcatatttattctttaattcttttgtatttggcatttcttactttccctattcttctggagtagacttatcaacattagtcatttgcatatagtccatccattcatcatattgttcttcagtaactttaccactcttcaaagcagcttctcttaaagtagtgccttctttatcagcagtttgcgcaatcttagcagcagcatgatagccaatatgtggcgacaaggcagtaacggtcattaatgaattctcaagtaattcatccattctttcttcattaaccgttaagccatgaatcattttatcagcaaaaccagtaattgtaccagttaaaatatcacaactatctaagaatgatgcaatgatgactgtcttgaagacgttcatttcaaaattaccttgactagaagcaaaggtaatggtggtgtcattaccaaatactttagcagcagccattgttacagcctctgcctgagttgggttaactttacctggcataatacttgaacctggctcatttgctggaatatttaattcatggtagcccgctctcggacctgaagcaagtaaacgaatatcttgcgcaatcttaaacatatcagcagccaatgttttaagggcaccatgaactacatcaagacctgaatggtgagctaagccccagaatttattagttttaacttcaaatttatgaccatagacttctgataatttaccagcaattttttcggtcattcccggtgctgcattcaagccagtccctacagcagtcccaccaatagctaattcgtagagagttggcttcaattcacgaatatatgataagtcatgtttaagagcagaaatatagccagataattcttgaccaaaagtcaaaggcgttgcgtcttgtaagtgggttcgaccaactttaacagtcttccaatatttcttttctttaacaactaattcatcaattaagtgttgaattgctggttccaacttgtccaatgcttcaacggcaacaatattcattgcagttggataagtatcattagatgattgaccacggttaacatcatcattaggcaaaatatctaaacctgggtgcaatttattagccaagttagctacaacttcgttaacgttcatgttgctttgagtacctgaaccggtttgcaaaacatgaagtgggaagtccttacgcaagtcagtatcgcttaaagctagcaaatgatcaattgcatcttcaattgcttcgcctttttcttttggttcatcgccaacttcaacgttactttctgcagctgccttctttaagtgtaaaaatgctcgaataatttgcaatggcatcaattcaccacttgggaagttattgcggcttctttcagtttgagggccccataaagcatttttagggatcttaactggaccaatagtgtcactttcaacacggtattcttcttcgctcatattatattcctccttattaagctctataaggtttgcgttaattatcaatcaccatttataatacctgtaaaggctttctttttcaatttcattccaaaaaaagacccaggatttttcctggatcatagttttatctagactggtgattcattcttttagcaaagaagtcaccaatgatttgaacgataaaaatcaaaataattactaatacagtagctactaaagtaacatcattattgaatcggttataaccgtatgaaatagcggtattacctaaaccaccggcacctacagcaccagccattgcagtcaaaccaatcaaagaaataatcgtcaccgtcgaaacacgaatcagttctgagcgagattctcttaaataaacatcaaagacaatatcacgcgcagttgagcccaaactttctgcggcttcaaccttacctgggtcaacactttctaaagcaacttgcacctgacgagcataaaatggaaatacgcctaaagttaatggtactaaggctgccttcattccgatctgtgtacctacaattttttgagtaactggtgcaacaaaggcaagcaggataatgaacggaatcgctctgaagattgaaactagcttatctgagaaattgtaccagaatttattgggccgaatcccgccatccttagttaaaactaaaatcacgccaaagataataccaagaatgccaccaaagatagctgaccaaaaagtcataaataaggtctgaaaaatactagtgccccagccagcgtctccgccccagccaagttgaacaacattgggtaaatatttacttaagaaactaatcatgatatacattccccttttcatctaaacgtgtaaatgtcacattttgcttagccaaaaattcttgtgtttgcttttgcttagctggatcgcctttcaccaataccaccaaagtaccaattggctcttcattcaaaagttcaacattcccataaagcattgaaacttctacgccaatttgcttatacaattcaataatgattgatttagtcacattagctacgctgtaaactaattgataaattgcttcatttttgccaagcttatcaagcgccaatgaattcaaagtagaaatcgcttcaagtgatccaccaacaaacttcttggttaaatcctgcttaggatgtaagaagacatctcgcaaactgccgtcttcaatcacattgccgtgttccatgacggcgaccttagtggcaatcttcttaacagcatccatttcgtgcgtgattaagatgaccgttaagtggaactttttgttcaaacgcttaagcaggtccaagatttgttgcgtattttgtgggtccaaggcactggttgcttcatcagagatcaaaatatctggattattagccaaagctctagcaatcgctactctttgttgttgcccaccagataattcagctggataaaagtcagccttatcttttaagtcaaccagatcaagcaattccaatgaccgtttttctaattcctcatcactcaacttttcatgttttaaggcaaaggctacattttctaatacagtcgtttcatttaataggttaaaaccctggaagatcattccgatgtttctgcgctttaattgcaattctttattagaaatcacctgcttgccatctttaagaaattcagtgccatcaacggtaatactaccggcagttggtttttgtaaaagattgaccgttctaactaaagttgacttgccggcaccagagaagcctacaattccataaatgtcgcctttttcaatggaaagagaaacattattcactgctttaactcgttcgcccttcttctgagggaaggccacttctacatttttcaattcaacaatactcatttttgatcctccttacttcaacttaacgtcccaggctgcaatttgcgtattgccatagtattccttagttagcttcttagtttctgcagtttggtaagccttgacgacatcttggtaaagcttgtccttttgtttgccttgtttgacacaaagaatgttaatccattgttttgaatctttgttaattggttcaatgtaaatcgtttgcttatcagtcaagccagcaggaccagcataatcattatttactacagaagcgtcaactgaattcaatactcgaccagtttgttcagcaccgatttccttaatcttgtagttatttggattgctggtgatatcagctacagtaactaaggtcttacccttcttcaacttaattaagccggcatttttcaaaacaaacagtgctcttgattcgttagtagcatcgttaggcactgcaatcgtggcaccatcaggtaagtcactcaatttatgatacttgcgtgaataaagtctgatcggtgcgatgtaggttctaccaatggcgacaacgccaccgtgatttgccttattccaatcctttaagaaggcatagtgttgaaaagcattcatgtcaatatcgcccgacttcaaggccttgttaggttggttgtaatccgtaaagttcttagtttttaaggtaataccatatttttccttagccgttttagcaattgacttccaaattgcggcttcggctttactttccccaacgattccgactgtaacagtttttgtctgattttgactgggaattcctggaccaaaactaaaccaacctgcaatcacgatcagtatcccaatgatcgtccaaataatggtatttcttcttctccgttttctcataaaatacactcctactttgataaaaataaaaaagcacccatccccaaaggacgagtgctcgcgttaccacctttaattcgctgatcacttacgtaatcaacctcactggctatcaaaaaatagcctgcactgttaacggatgcagccccgccgatagctaaatatcaccaccggtcatcgttccaaacccatattcactagctcctatttgccaactttcaccaccacgctggctctctttatcaatagaagttctagttactcagtccttcaagatgttgttttcttgatttgttataaataagttatcatcttcttttaatctagtcaacatcttttttaatttttattagataaaagcgatttcattgtataattaggatatagttaaataatttatttttgctaaggagaaaaaatgaagaaaaatcgctttcgaagttttgctctctcattagctgcagcaattggattcatttcttttgctaatactaatgtcccatgcaacaatcaaaccgtctatgctgtttcagataaagcattagtcaatttgaaataccacaacaaacaaattgtgaccgttgatcatgatcagccgcagttttctaagagtacattgagcaagaaaaaaggtccatggcaaaaatatagccaattagattatttgaaccgagctcatgctgctaatgctttactaaataaaagattaatgccacatagtcagcgtgcggctttaacttggaatccgaccggctggcataataaacgaatcgctagtggttggttgtataatcggtgccatctaatcggctatcagttgactggtcaaaacaacaatccacgcaatttgattaccggtacgcgtgaattaaatgatccggatatgcttaaatatgaaaatgaggttgctgaatatttacgtagttcgagcaaaaactatgtccgctatcgggttactccaatatttaaagggaatgacctattagctaacggcgttgaaatggaagccgaagcaactagcaaaaacgggcttcgctttaatgtctacatttttaatgagcaacctggtatgttgcttaattacaagaccggtacttctaaggttaaacatgggtctagtactattgctgaacatgtaaaatctagaaaacgatccacttctcgagtaaccaagaaacgaaccattcaccatatcaaaggtactgtatccactgcagaacaccgagtcgttggcaatcgtcgcagtaagatctaccatgtaatgaacgggcaaaattatcatatgtcatcagctaatgcagtttacttcaacagtgaagctgccgcacaagctgctggatatcgaaaatcattaaggtagtaaaaaagtcagagcaaaactctggctttttcattatcttcttatttcacattatttttgccacgatcatatgcttccttgaattccacaaaagtcatgttctttcctttttgatcaaagacaaccaacacttcggcgattccatccaaaattttagataaccatctaaagatagtcactgccgcacagaataagaccgccaaaataaataatgatttgttattaagcattgtcaatgagaacaatcttggaaaaaagatagttgagccaataatacagataactgataagcccataacagcaagtctaaatttgtttattggtgccgaaatatgatacatcaccataaaaccaactaagactagcaacatagtcgctgtcgtgcctacctgaccatgatcaagtgagatagaggcccctgcaatgactaaaattgcaactgccagccaatctgttaagccccctggaattgcccgagctaaaacatttggcataaactttccacgaattcgcttgtggttgctttctaaggccaataaaaacgacggcaagccaattgtaaatgcagagatcaatgtgatctgggctggctgcagcggataattgattgtcataatcaaagagaagatggccatcaagaatgaaaaaatatttttcaccaagaacaagctggctgaacgttgaatgttattaactacttgcctgccttggttcaccactaacggcattttagcaaaattagaatcgagcaaaaccacttgtgaagcttgcactgcagcactattaccagaagccatagcgattgagcaatccgcctttttcatcgctaaaatatcgttaactccgtcaccagtcatggctacggtattaccttgattttgcaaagcaacgacaaactttcgcttttgatcaggcttaacccggccaaagacattatagttttgcacggcctgctcatattcaccatctttaatggtttgcgcatcgatatacttatctgccccattaattccagcttgcttagctactcgagcaacggttaccggattatccccagaaataaccttgatatcaacaccttgctggttaaaatattgaaaagttgacttggcttctttacgaattggattcgacaataaaatataaccgagaacttgtacattttcctttaaggcggaattatcttcagttaatacgccaggataattagccgcaatcaacacccggtagccttctgcagcatatttttcaaattcagtttgatattgcgcaaattgatcacgcaaaaccatttcaggcgcaccaattaaagttgtctgattgccaaaaattacaccagaatatttattgactgaggtaaaaggcaaaatgctatccgccgttttggttccatctttaaaataggcttgaatcgccttcatcgtcgcattatcagctggcatgtttttagcaaaatccgcaatgatgctacttaaatcaccagtaaaattcttgctactaacagctttttctacggccatcttcggttcggtaattgttcccgttttatctacacaaaggacatttactcgggctaaagtttcaacactcttcatatcgtgcagcattacttcttgtcgcgctaatcgcatagcagctagagctaaggcaatcgtagtcaataaatatagcccttctggaatcatcccaattaaagcagcttccatggaagtgatactacgcttgagtccaatattattcaaaaagaaactctgactaaatagggcaattcccaccggaataatgatgatgccgacccatttaaccagacgattgattgaacgcaccatttcagattgttcaacactgcccattgcctttgcttcgatcgttaatttagaaatatatgagtctttacccactttttctaagacggcataagccttaccggaaactacaaaagaacctgacattaattctgcgtctttagtcttagtgatttcatcagattcacctgtcaacaaggcttcattaacccgcagctcacctgagattacccgcgcatcagctggaatctggtcaccagtttgtaaaagaacgacatcatcttgaaccaatttttcgatgggaattttttcttcttgcccatcacgtaccgcgataatttccgtcgcattcatcacgtttaacttgcttaaaacttttttagcacgaagctcctgcacaataccgataatcgtgtttaaaacaatcactggtaaaaaagtcagatcgttccaggcaccaacaaacaccaatagcacagccaaaatagcaaaaatcaagttaaaataagtaaagacattttctcgaattatttgagtagctgttttggactggtcatcaatggcttgattaacctgtccattttgaattcttggatcaacttcagcttgagttaatcccgttatttgtttatctgtcataattttctgtcctatactgaaaatactttcatccattatagcgaaaaataaaaaagccacgcaactctgcgagactttttaacaattatttattttttctatgataagttaaaaaagtatagtcatacttgttcttttcatcatgatgatgctcttcgcgactaactaattcaaaatcatcatagttaatcgctggcatcactgtatcagttttaaaattagctttgatctctgttttttctaaaagatcaacttgatcaagtaacgccctaaagattgaaactccaccaattgcacagatttcttcagtctgatgttgacgaagatattcatttaattcagctaatgtggacacaatcttcacttgctcattacccgcatatttttgctttaattcttgacgatgagttaaaacaatatgttttctctctggtaacaagtgaggcaaactcgcaaaggtttttcgccccatgatgatcggatgacctatggtcttttccttaaaatgcttcaagtcagccggcagatgccaaggcaaatggccatcgatgccaataccatgctgctgatcttcagcccaaacaaaacttaacattgagacctcctaaactgcaaccggtgccttgatcgtgccatggtgctgataattcagcactttgatatctttcatttcaaagtcttcaatgtgctttttttcaggattaagccacaattcaggtgaatcatatggcgtccgactcagcaattcctttacttggctaaagtggttgcgataaatatgtgcatcccctaaagtatgtacaaattcacccacttttaagccggtttcacgcgcaatcatgttcaagagcagcgaatatgaagcaatattaaatggcacgcctaaaaacatatcaccacttctttgataaagctgcacgctaattttgccatcgactacataaaattggaacatgacatggcatggtggcaaagcactagttggcacatcttccggattccaggccgtgacaatcattctacgagaatctggcgtttccttaatttgcttaatcacgtcagcaatttgatcgataaaaccgcctgtccgcttttcccaatgacgccattgtgccccatagacatcacctaagttgccatatttctgggcaaaagcaggatcatcaagaatgcgctgatcaaatttcttcatttctgcttgataaacttgattaaattctggatcactttgactacgcaaaccaaaattagtcatgtcaggaccctgatattcaggactttgaacccaatttttgaaggcccattcatcccaaatatgattgttatgctctagcaaaaagcgaatattggtatcgccacgcaagaaccacaacaattcacttttaatcaaaccaaatggcacctttttagtcgttaaaagtggaaagccctgtgtcaaatcaaaacgcatttgggcaccaaaatatgatctagttccagtaccagttcgatcatccttgtcatgtccttcagtcataattttttctaacaaatccaaatatggttgttcaagaattgccattatcttcacctttcaaaaaacatttcttctaacataccatagatcttatatgttggataatgaaaaaccatagatttagtgtttttagataaaaataaaaaggtgaataatcaccttaattacttttcttaaattcatttttgtgtctaactaagtagacgattgttgccacaatcaagactaatgcccctgcgataactgaaattctcgtatcaggattgagaaacatgaaaattacaatcattatcaacattgcaaaggcaaagtaatttgaaaatggatataacggcaatttaaatggatgatcttgtatcgcttctttgttatgccgtctaaatcttaattcagctaataaaatcacaaaccaaggaatcattcctggtaaaacagatgaactgaagacaattacaaataaatcactagctgaatgattaaattgtgaagcaattacgttcaagacaaaaccaataaaaataccagcagaaatccccataattgcacgatcaggtacaattcgcttagaaatatgcttaaaaattcccggtgcttcgtggtcatgagatagcttaaacaacattctgctggaagaataaatccctgagttagcaccagaaagagcagccgttaaaacaacgaagttaattattgaagcagccgcagtaatccctactttagcgaaagtcgttacaaatggtgaacctaggctgtctaatttatcccaaggataaatcgttacaatgacaaaaattgctccgacatagaaaattagaattctaaacaaaactgacttaacacttttaacgattgcctcttgtggattggctacttctccagcagaaatacctaataactcgattccttcatatgaaccaacaatgattgacattgaaaagaaaaatccttttattccaccagtaaagaaaccaccgtgagaccataaattgctaaagccagttgggtggccgccattacctacaccaaagaaaataacgataaagcctaaaataatcattaaaataatcgttattactttgatcatggcaaaccaaaattctagtgatgcataagccttagcactagctaaattggctagtagtaaaaaggcaataatgatgatccccgaccacagcgccgaaatattcggccaccaatacttcagatattcagttgccgcgactacttcggacattcctactacaatatattcaaagacattggcccacatcgctaaatagccggctaagggatgcacatattctgttgcataatcagcaaatgaacctgtccctggattgatataaagcatctcacctaatgcccgcattacaatatataaaatcaaccccacaaacatgtaggctaataatactgacggaccggtccatttaatagtcgaggttgaccccataaacaaaccaacaccgatagcaccgccaagagagatcatctccatttggcctgctgtcattgttcgtttgagttgaggagctttagattttttattcaattttcacaactccaataattaatctatcctaattaataacccgcaattaatttactggttaaatcaacattttgtcaaggttcaaattaaaaatattaatatttgggagtcttttctctaattgattttttattcttttattaaatgaatttcgcgatcaaacatttcctgcatctgtttattaaaattgtgagcaataaagacaattgtggtcttgctttttaataatttttgtaaaatatccatagtcgctgtctgatcaattgcactagttccttcatcaatcaaaataatgtcactatcatggatcttcgatcttgccaatacgatcttttgtcgttgtcctccggaaatattcaaattatccaagtcaattttttcatcgacacctgctttaaactttttaatatcggccgcaaaattaacttcatcaagcacttgagctacttgattattaagttgcttgttgaacattgtaatgttttctttaattgtacccggaaataggttcggctcttgtggaatatagcctattcttgacatattaggcttaattgtcaaaccttgactattttgaaattcaattttgcctgtgctaggtttaagttcacccaaaatcaatttaaataaagtagacttacctgcgcctgaatctcctgttaataagattttctcgccaggtttaactgcaatatcaggaaaagtaagcttttcaccattaggatactgcaaagccaaatcttttgttgaaaatgctactggtgtctcttcttggccagctttaactttttcaatcacagtagcatcaccatcaacttgtttcattaaatcctgtgacgatttcataaaacttaatgcctgaattgtttgttgtaagccgatcgaaatattagctgcaaagttttggacagacataattgcaccaaaaatcactaaattcttagtgatcaaaaaagccgtcaaagacaacaggattatttgtcctaccatgttacagatcccattcaaaataattaattgctgttgagcagccgtttgtttaacatgagcctgttctactttacttgaagttttttcacctacctgaaataacttagcaccagcaaaatatcttcttaattcttctaagccagagaaccatttagctaaaacatctagataatgcttattttgctcagaaacattattagttgcttgttccattttcttttgtactaatttaggtacaaagtaagaaacaatatcaatcactacactagtcaaaaagattgaccaattaattgtaagtagagccaccaatgccgcaacaaacattgagccatagaacggcacaattggataccaatcaaaataattttttctaatcatttctaaatcattagtcatccgattttgcacggccggtacttgatgattttgaccatctctaaagtaatgtgtagccaaacgagcgcgcacctttttattatattcttcttcctgcactcgaattacaaattggatataatagatcatcccttgagcagctaaatataaaatccccattaaagccgtcgcaagtaaaatcttcacccaagcacgatctttgatataagtcagccagtacatttgaatgtagcctgcaccaaaatagcgaaactgtcaaatcttttgtgtaaatagttctttctcgcaaattgattttttaattatttatttaatcaaagtaggattctaaggtgtcctgaacctgaccaaagcctttatgaattcgattgaaataacggtcattgtagctcattgcctgaatgccaataaaagcatcaagcgactgttcagttggaaactctgccttaggcttagctttgcgcttgatcacattgttaaatgattcaatcatgttagtcgaataaattgaagctctgatctgcttgggatagttataaaagaccagcagatctggttctatgtctttcaagcttctgataacatggctgtaaaccttgccccatttggtatagaagtcatgcaggacagctgtggcttcttctttgtttgtctgttgatgcacctgtttgaattcgttcatgatcttttcacgatcgtcgacgcgtactttagcgcagatattgcgcatgacatgaaccaggcagcgttgaaaatgagctttaggataagtcctggccaaggctgttttcatgccaacaacaccatcagaaagaaaaagctcaacttgctttaagcctcgggatttcatgttttgaagcatatctgtccagacttcaatgttctcgctaggtgcaatgcagtagtcaatgacctccttgtgcccattaggcttgatgccaatggcaatatagactgcttcacgctcaaatgtttctcggcgcaaaggaaggtatgtcgcatctaaatagacgcagaaaaacttgtcgcttagcttgcgtttgtggtaagcctcaacctttggaatcatctgcttggaaatatttgatacctgagctggactgtaatggctgccatacatcttttcaattagatcggctatttccctggtggtcacgcccttggagtaaagcttgataatcatgctttccaagatatccgagtgctgcttgtagtcaggcagcgtgtgctgatgaaattgaccgttgcgatcccgaggcacttgcacttcaattggtccaaactgggtatcaaccttgcggaaataagcaccatttctagaattgccagtattccagccatttctggcatagggatcatagcctagaaaggcagtcaactcagcttctagcaagttattaacagcctgttgtagctctttgcgcaataaatcatttattttgtctggattgaatagagcttgagcaaaatctttggtaaaatcattcatgaaggagttcttctttctgtatgtgtttttttgttcaaaccaatcatacgagaaaggaactcctttttctaatgttttaagaaataaatttaaggaattattcatccttacacaaactattttacagtctcccaatagcagcgacacctgaaataactgataaaatattaatgtaaataaatcttaaataattagttttaataaagcctttgaaactcattcggcgtcacctcgattagtcaatttaatttgccgatcaaacattgaaactaattctgtagaataattgtgcgcaatcataattacagtacttggagtattcaataaattttgtaatacttgcttcgtcccagcactgtcaattgcactagtcccttcatcgatcaatagccaaggtgattgatgaatcaaagctctggctaacacaagcttctgcctttgtcctccagataaatttcctttatccaaatcaatttgactattaagtccagcagacatcttatccaaatccttggtaaaacctacttgatctaatacacctgaaatttgattatttaaagcactattaaacatcgtgacattattggcaattgtgtcaggaaacaaggtattatcttgagcaatatagcctaattcatcaagatcaaaatttaatttttgaccattatgatcaaaaaaattgatctcaccttggctgggcgttaatttacctaaaattaatttaaataaagttgacttgccagttccactatcaccagtaagcaagattttttcaccttgcttaactgtaaaatctgggtaagataaatactcaccatttttgaattgtaaggccagatcttttacttctagcctgttaatcttcttaacttgatgctgatctggagctatttttactggagcttgaagattagtaatttccttattcaaatccttggtggatttaattaaattccattccgttacaaatgctgaaacaccattcattacagttgaactaaattgaatagtagtaattaccgcaccaaaaacaatttgtccttgcaaatataagtaagcacataaaaccatcaagagcatttgtcccacaatattaactacaaaggtgatcatatctgcaatagcaatagttgctccttgatgaatagctgcttttttatattcgtctgcgctttggttaactgattcactaaatatattaaaactggcatatcttcgtaattcatccaggctactcatccacttggctaaagtgtttaagaacttttcatttttcttagtaacctttattgtggccgatgaagtcattttttcaaaagttttaggcaaaaataatgaaattgcagttaaaatcaccgtcattactactaaaagccagttaaatgaaaacaaaattccaattgagaaaagcacagacaacaagtacataaaaccgtttttgattggttttaaataattctgtgttagctgatcaagattggcaaccaattcattttgcactttagcagtttgggcaatttcatttttaaaaaagtagcgactaatttttacacgaatttggtgcaaataagattgtgattgctttccgtataagtaatctgaactagtaatcaaggctaatctaactagatcacagccaatagccaaacaaataaaaataataaagccaaataaattcattttctttagctggttaaaggccggggtcatcaaatattgcgaagcagcatcaacggttgtaccaatgataaccattagaaaaattaaaatgaatttagctttattgaccttaaaaatccctgtaatactcatttgtctcatctccaagcaaattaaaatattaaaaatatcttatttatgtttaatattactgctatttttttaatattcaattactttttactaagtggttaaaaaaataacttgaacggcaaaattattactatatctagctaattcattaggaaaaattggcaaaaaaatagactagaaactcattatcaagcttctagcccattagtttaattcaattattaacggtaattcttcaagaaatctatcatcttttgataagctgcatcatgatctgcatcatatgcatcgactacatcgactactttattatccttagtaataatacggtactcacgtaagtctttcttttcattagcaacaactgtaatctcacccttacctggggtagagaacaattctggattaagttcttcgttcaacttatctgataattgttggttaaatgcgattgtattcatttttgtttttatctcttttctaaaaaatccaacacagacattatatcattattagataacgttgatgaatttagttttattttttatcaaggagaactgtacctgcagaaggattatgatcaattgcaccaatgatggagcagtaacaccttcaatatagcacagcaatacttattcaaaaaatatcaatttgttattttgcattattacttttacatatagatttcacttaattaaatgcacaacaaacatggcaattcctaagaatacaaaaattaaggcaacaatcatactagttactgtgctggtaactaaaactaaaatgatcatgccaataattgaataaatatccatttgttatccctttaattaaacaataacagcagtatttacttttattatgtagcatgaacactttaaaatacaattttaacgtattttaatttgctaactttcgatataacggcaatagctgcccaataccatctaagatgaagttttccatatctgcaacttgatcttgctttctaaaagcaaattttcctaataggaaactggattgagttgcttccttattaaatgaagtctgtttttcagcatctgttaaatactcatttaaggataaatgatcagcaaactccatttcgtttttatcccataagtaccaattattagttgtccgcccttttgcccaatcaggaagatcagttaataatttattgtattgttcaggattatcgccgcgcttttcactcttataatgctgaaacataagataaacctgcagctgcttattatccagcatcacgccgatgcatggacttttatcggctaaagcattcaaacgataagctgcccagtaatgatcgcgtaagttccaaccattggtccaactttcaacatgaactttagcaaatttatcttgtggtaatttttgataaacatttaagtttatttctttccaggtctgccaaatttctttaaaatctgtttttatttgcgctaattcatcttcagaatattgcgatttcaattttttaaaagaaaattcatcccgatcaaaaattgcatacatttcttcagttaattgcgtcattttacaaagtccttaccatatttacgctagtaacaccagttggatctggaatatcatcattggtctcgccttcattataaaaaccacgtttttcataaaatttaatcaatttcggtaaacaagttaaagatatagcttgacgattttgctttctgccctcttgcgctattgcttcaattaattttgtcgctacgccttgtttgcggtattcaggcaagaccgctaaactcaagaccatttgatagcgatcatctttttgattaggatgattttcaaaatataattcatcttcaatatagcgtttattaaaagcaggaccaaaaatatgaccaatcacttttccatcttcttgtgcaactaaaaaagtatcaggataattctcaattctaccaatcatatcttgttcagtttgctttttagtcatcttaaatgcgtcagattccagttctactacttcatttaaatcatccattgttacggtgcgaatgatcataataagcatcctccttaggtttatctctaaaagtgaaaaagggttcaaaagtcatttagactcttgaaccctatattattactctctatttaattcttccactttaatttaagacgatcttgctcagtctttttttgaaaatacgtcttcaccttcggcactacttcttcgccataaattctaatggcattcatcacatcttcatgcggcattgaggcaattggcaaatgaagatagaagcgagttaacccaagttcttccatgactttgatgatcttatttgcaactgtctcgctatcgccaacaaaaatagctccattttctccaactgcctcaagatattgttcatatgtcatccctgtccattgcggtctttccgtactaatttgatcaactaacaatttcgtaggatagaagtaatccttaattgctttgtctttatcatgatttaaccagccccaagagtgtgcagcaattggcatcttcgttaaatcattgccaactttttctgcaactcttctgtacaacttaattagtggtttaaagtgcaaaggattaccgccaattatcgcataaacgattggcaaacctaactctgcagttcggatagtcgattctatgcttccacctgtagctacagaaatagggattggctttttagtgcgcggataaattcctttatgatcaactctaggtgtaaactttccttttggccaatcgagaatttcttctttgttcattttgagtagcatttctagtttttcaataaaaagttcatcgtaattttctaaatcataaccgaatagatcaaatgcctcagtaaatgatccacgtcctgccatgatttcaactcttcctgatgcgattgcatccattgttgcatattgttcataaactctaattggattaattgttggtagatttgtagtagcacttgaaagatggatttgcttagttttcgaagcagcagctgctaaaatgatttccggtgctgagacagcaaaatctttgcgatggtgttcaccgattgcaaatgcatcaatattcaatttgtctgcaagaatgatttcttctaataagtctctgattctttgatcatgactaattgcttttcctgttgtttctaatggtgtagtttcaccaaatgatgagatacctaattcaatattcattttatcaactcctaaattatttcacttactttttgtaagtaaaataatagcagataatttttgaaaaagcaatatcttgaatatgtgatcctttacttagttgcagttcttctaccaacatatttgataaataaagccatgattaaaataactaaacataaaagaaaaatatatgcatgctgtgttccgattctggttaaatcagctgacttagtacctttttgactagaagcaacgattgctgaagtaattgaagttccgacagcaccggcaaattgttgagcagtatttagaatagcgttgccttgagtagtttcactctcatcaatcactgccaaagtatcagtcataacatctcccaatatcattcccattactgccatgtaaatgatataaactatcaatataaaaatattattcatctgattaggtaatactgcaaaaaacaatgtttcaagcaacatcaaacttacaccaaataaaacaggtttgcgtgcaccataattatctagcaaccgaccaccaattggacccatgattgcaccagcaactcctgctggcaaaacaatcaagcctgctaaaaaagcagtattatgattaaccaattgaatgaaatttggcaataaaaatgcattgcccaaagatattagttgaatgcagaaaaaaccaataatatgacctgtaaaactatgatttttaaataattttagatccaaaattggcattttaattcgattagatctccaaattaacagagctaaagctaataaagcaatcaaaatttgaatagcagttgcacccaattgtcctgttcctaagttgctaaagccaaccagcatcccaataaagaagattgcaattatgataaagctaaggcgatcaatcttaacttttttaacagcagatttttgttcaataccccagatgcctaataacaatgaaataataatcaatggaattaaaaaccaaaaaacctagcgccaattcagttcctgtagaacaatcccgccaaaggtcggcccaagtgctggtgctattccagtgatcatactgccgacacccatcatagtaccaactttacccttaggcacttgttctaaaatgatgttaaacattaatggcagggcgattccagtaccaatgccttgaattactcttccgatcaatagcaccggaaaaattggtgcagtagcatcaactattaagccaagtaaaaacaaaaaattagcggttaaaaatagacttttagttttatatgaactttttaatgcagcagagattggcacgataattgaaactgcaagcaaataaattgaagtcatccattgcacaacattggttgaaacattaaaatcacgcatcaaggttggaaaagcaatattcattgaagtttcaactagaacgccagaaaatgacattaatcccgtggcaattactgctgcaaacacttttgatgatattctttcattatttgattccattttttctccatttttgacaaattttaaaacttttagtgccgtatttatttcagcttgtgtaaaatgactacgaacttttcgatcatcttgacgcatataatcttttatcttgggaataagtgatttactcttagcagttaaagaaacatccttctgtcttttatcgaccgcattagtaacgcgtttaactaaatctcttttctccattctttgaatcatgattgtcaccgttgaacgctttaaatctagtttcttttcaatttcatgttgtgaaacagtttgattttgatgattagaaataaaatctaaagttgtcatttgaacgccggtgatacccaaagtgttagcaaacgtctctcgttcacgatctatttgaatggaagattgcttaataaccttttttatcggttccatataggtcctccttttgttagatgtctaacatattttgcatttatatttgttagatatcaaacatattttttactaatttgagactttagttcaaagtaaatactagtaaatatctatttcatcatttgacgtaaaactcacatctaattctttgagactgtaaaatattttgtgtaaggatgaatgattccttaaatttatttctttaaacattagaaaaaggagttcctttctcgtatgattggtttgaacaaaaaaaacacatacagaaagaagaactccttcatgaatgattttaccaaagattttgctcaagctctattcaatccagacaaaataaatgatttattgcgcaaagagctacaacaggctgttaataacttgctagaagctgaattgactgcctttctaggctatgatccctatgccagaaatggctggaatactggcaattctagaaatggtgcttatttccgcaaggttgatacccagtttggaccaattgaagtgcaagtgcctcgagaccgcaacggtcagtttcatcagcacacgctgcctgactacaagcagcactctgatgttttggaaagcacgattatcaagctctactccaaaggcgtaaccaccagagaaatcgctgacttgattgagaaaatgtatggcagtcattatagtccagctcaagtatcaaatatttccaagcagatgctccccaaggttgaggcttaccacaaacgcaagctaagcgacaagtttttctgcgtctatttggatgcgacataccttcctttgcgccgagaaacgtttgagcgtgaagcagtatatattgccattggcattaaacctaatggacataaggaagtcattgactactgcattgctcctagtgagaacattgaagtctggacagagatgcttcaaaacatgaagtccagaggcttgaagcaagttgaactctttctttctgatggtgttgttggcatgaaaacagccttggccaggacttatcctaaagctcattttcaacgctgcctggttcatgtcatgcgcaatatctgtgctaaagtccgggtggatgaccgcgaaaagatcatgaacgaattcaagcagatacatcaacagacaagcaaaaaagaagctgcagctgtcttgcacaaattctatgccagatggaataaagcttatagcaatgtcatcaaaggtttgaaggaaattgagcccgatctgctggtcttctacaattatcccaaacaaatcagagcttcaatttattcaaccaatatgattgaatcctttaacaacgtcatcaagcgtaaagctaagcctaaggcagagtttccaactgaacagtcgcttgatgcttttattggcattcaggcaatgagctacaatgaccgttatttcaatcgaattcataaaggctttggtcaggttcaggacaccttagaatcctactttgattaaataaataattaaaaaatcaatttacgagaaagaactatttacacaaaagatttgacagtttcaattctttactaagaaaaggattttagttacatttgttgctaaaatagatttattatttctactcaaaataaggagttaatcataaatgaataaactaaacttcgaactactgcatatttttgatgttgttagtagatttgctagcttcagtcaagctagcaactatctctacctagaccaatctactgtcagtaaaaaaattagacagctagaagctattgtcaataagaaattatttattaggaatactaatggtattgtcctcactgctgctggacttgcttttaaaaataagtcagataaaatacttcaagatttaaaagaaataattgcgctaaagccaactataaccaccttacgagtcggggtatttgataatataagtgcctatctgatgcccgatatttttgctgaaaattttaatctatttaatgagggaaaattagatgcaatagttatcaatagcgacttctttactcaaattcaaggttctgcaattgagacgcaaattactaatgaatcttttgcaattctctttcgcaaaaataatgctctcattgcaagccaaaatagtatttcgttaaatgatttaaaaaataaaaatcgtaaatcaaaataactattataaaaaatatttattggtaatagttagctatgcataaagcgaatgaataaagattattaattagctattacgtttcttaatttggcgattttgtgttaacttgattgttatccaaataacaacgtatgaaagaataaaaataaacaatgtccaaatattgatagaccaattatttaacaacatcattattgagaataagctaaaagttccaattaacataaaaagtcttcctttccgaattcactatttaaataagtggttaaattcaaaatacaggatgctaaaatttaaaatcctaaaaattaatatctgtaagctaaatatttaagttattgaactgagtttgctatatttaagttaaaagataataaaaggaggaatttcatgaaagttacttttaaaggaaaagaagttgaattaattggcacaccacctaaggttggcgatgaaatgcctaactttacagttttagacaaaaataagcaagaagttactaaagataatttgttaggtaaaaatactttaatcagcgttgtgccagacatcaacacttccgtttgcagtattcaaactaagacttttaacaaaacaatggatcagtttcctgacgttaactttttaactatttcaactaataccatcaaagaccaacaaaattggtgtgcggctgaaggtgttaaaaatatgcaattaatgtctgatgaaaaattatcttttggtaaagctactggcttactaataccagaatctggaatactagcacgcagtgtgtggattcttgagcctaacggtaaaatcgtttatcgtgaaattgttgatgaaattactcatgagcccgattataatactgctgtaaatgaattaaaaaagttgctgtaaaatttaaaaaagattgcctcagtacatacacatatgctaaggtaatcttttttttctacccaaagtcaagtattatcaatgatttaagaaaataaatttacttgttttaatgatgcgaataaggttaaagcaaataagagtttaaatttaagaaaaagcgaaagtaccacaaataagcctatgaatacttgtagtttttccataggttgcttatacttaagttgattatttgatttcagctaaagtcttttattttcggtggctatgttgtaatcatataattgatcatgtttgataagagcaaacattgtgcgtatcagtttatggactgatgcaatggcgattttcttatagccttgtctatttgaagatcgttttttcttgtcataataatcagttatatggcaaggctgcgtagcctttaccgtctccatttgagtaataactcgataaagtatttttctggcaatatgattgccatgcttggtaatgccaagagaactgtctttttcaccagattggtaccttcctggatcaatgccaacaaacgcatcaatttgagctgaagtgctaaaccgtcttagatcaccgagctctgctactaatctcactgctgtaattctagcaacccctgggatactcaaatagatggataaagcacgagcgtttactgctttagccagcttttccatgtagttaattacatagtcgcgttcttgctggagtgaaaataaattagaaatgttcctttgaatagctctaacgataatactatctttggaatcataaggataagcttctctagcaaaagcgtataatcttgtggttaagtaccgtgccctttgttgtcctattccagaaatagaattaagcatttgagttacctgtgtctcattcttttctagaacatatccagcatgtgggaaaagactaacaagcgcccaataaattctgccagatggatgagacagtatttcttcaatttgtgggaaagtggattggaggttgcggtgcaattgatttttagtagtaactatactcctagtaagttcttcataatagcgactggcattctgaagttcatgatactctctgggctgtggatcacgcagcttttgcggggcattaaattgaattaaagccaggcgataagcatctaccttatcagttttattatggcgtaaattattgtccattagctttttcgctttaagcggattaagcttcaaatacttaatatgataatcctctaagaaagcttgcaggcttagagaataaacaccagtagcttcgaaaacaactaaaggagttatcaaatattggttcagttgctcataaagtttttgatagccaaaggaatcattagagattctaaaagattcgccttgtttgatccggtcattaaccacacaaactgtggaagatttactgctaacatcaataccgaaaataatttgtgattccataatataacctccgctgtgaagataaacctctttatcaacctattaattctaattttctaaacacggcatctaagtgcccacagacttcgaagagacttaagaataggtggtaaagcagtccgtttcttttacgacatcaagtgtctaaaaagctgaagacttgatttgctttatcttcactttctattttagacaaaataaaaagtgccagatcgtgaatccgtcgattcatgatccaacactaggttagtatgtttctttagttcttatattgttccattctttgattaagttcttccttattaaaattatctaaattaattgcttttccacccattaaccaatcaatcatttcaggatctactttatctttaggcgtatcgtaataatcttgcaaagaccatacaccaccaatgtcatcaattattccataaccttttccagaaagtatctttggacacttaggagctgcttgatcagtagtgatgttcttaatatctacttcgaattcccagctatcgccataatcataagttaataataatttatctctcttttcaaaatacgaaaccttagctttttcataatctatgcctgtagccggatcccaatctttcgcttcagcgatactttctgcattttcaaagcgttcctgcgtttttttattcagcaaatcaaacatatgtccaaaatctgcattaaacatatctagcatagcaacttctaatgttttcactgacgtattgccactaataataaatctacgccaagtagatggtttaaaagactttagttttactctaatttcataggtagctcgattgcgagtttgattttcaaaaattgtcttttttcgtgttttctgctttttatcatgactctcaagatcttttcgcaagccttctaaaattctagacaaatcctgagaagacagatctaaatcttcaagttccaaaatctttttcggatttgcttcaattgccgctatcatatcgtttatcaaatcctcatccaggccttgatcggagtatgaattaatttcttcaactacccagtcaatattcatccctatttctttactatcagttttacgaataagacctactctactcaaaaatacatagaaatttttcaaagtatttgtaatctgctctatttctagcggatgtagtttattgttagatatcataatccataaataagaaatcgcttctcctaaatcattagtaactaaatggatcttattacgtaataaataatgatttagataatccggcagcatttgatcaggttggatatatcctattcctgctggtacatatttagcatattgatcaatgagtttttgattattttctttaattttagcaacaatcttttcattgccttttactggtttattttcatatttttcaaaattagagaaatcttcaaattttggcactaagtcaacatacttatatcttcgatttggtttttgcggcttaatagggaaatacgtactaacctcatcaatcatcttagaaataaaattttgtccaatctgactatccaaggcaaaaatagtcgctgacattacagttagcttatctacgatattcttttcatcttttacaacatcaatcaaatttaaatattcgctttgattatcctctataagtttacgaattttttctagcattaaactagcttggcttttagtatcgtaaaaagacatttgcttggactttaccgctgaaactaatttttgttgctgtttaaacaaaataaagtcatagcttttaatcgcattagcaaaaacatcattaaacagtttggtatcaagtttagttaataaaattggaaaactagtgtctttttcaactaataaatagtacttttgcttttgaatatttattacatctgcatcccaaacagtaaaaggctcattcttaataatatcaatcttattttctttaatttctggtgctaagttaataccgtatcgtactggaagcatgtggttctccttattaaaataatttcattttaattttatcatgtctattcacaactattcatctcagaagcaaaaaaatgaaggcaatcactgccttcatctaaaatacacaaattttagtcttcttctaaaaccggtactgtctttttatttctaacatgatatacaactaaaccaattgctaaacctaccagtgctggcactaaccatgataagcccatgctggcaagtggcaaatgatttctaagtgaagccactgctaaaccaaatgaactttgactaaccacacttgggaaagcaactaccatatcgcctaaagctggtacaacagtaaataggattacgaaaaagtaaactacacctgccttattaaacaatggtgaacaaactgatagcaagatcaaaaccatggataaaggatataagaacattaacatcggtgttgaccatgaaatgatttgatccaaaccaaagttagcggctaagaatgatgccaagcaactaagtgctaaccaaacgtggtaacttaccttaggaaaatgcttatgaaagtcttgcgcaaaagcagcaaccaaaccaactgcagtagtcaaacaggtaactgtcaataagaatgcaagtaaagcttgaccaaagacaccgccataaacgttaacgatttggttaaaggctaccccaccgttatcagaaactgcaaagcgtccgagagacattgcacccattaagatcaataacaagtagataaaaccgattgctaaaacggccaagacacctgatttagcaacaacttttgaaacacttttagcatctttttgtcccatgccacgaacagctgtaacaactgtaaccccaaaggctaagcctgctaaggcatccattgtgttataaccctctaagaagccatttactaatgctccatgcttataagcagcagttactgcagcagtttgtggattccccaacggacgagcaaaagctacaagaaacactaggaataataatgccaagaataatggatttaataccttaccaacgttagacaagatattattttgatgataagaaaaagcaaaagcagctaaaaagaataaagctgagaaaacaagtaaagcggaactttgcatattcttcggcataaatggtgcaataccaactgtgaaagaaatggttgcagttcttggggtaccaaacaatggtccgattgtggcatggattaaaaccataaatactactgcaaatccggcacccagcggcttaccgatgtcgtatactccgtttgcatgagtaattgctactgctaatacagataataatggcaataaaacccctgtgattaaaaagccaattgcagctgttccccaatttgctccagctagttgtcctaaatgtaatggaaaaattaggttaccagccccaaaaaataatccaaacagcaaggaagcaacaacgagataatttttccatgtaagttttttcgatgtatgatctgtcattttctctcctccaaaacatccctgataaacaaaaaagaccctcagctgcaaattgcaactgagggacgctttgagcgtggtaccaccctttatttatatcactattgctagcaatacctttcacgtacagtcaattacttgacgatacgtaggcactataatgggtgctcccactacttcttactttaagttaagaaatagaactcgaaagtgattttcatttaaacttaggatttatctcctcacacctaacgagactcgctgtaaattaagtctaaattactcttctttctctttgttttcagatttattaaatttgttaataactattttaatcaaaatataatcgttgtcaacaacttttttatttatttttcaaattttctattcaaattgagtctgccaattaggatcattatttgccgcaaaacacatggtaatttgttcctcagtatttcgcccaagtgaaagcttcggtaaattatctaatgcaaaataatcacaagcatcagtttcatcgttcggcttaaattcaccactaatttctttgcataagtaaaataccttcgtaatgttggtggccaaaattggtttattatgatgactacgatcttgaactgcaataattttgacgggtctaactactctacctgcttcttcatatgcctctttaacacaattttgtgctgtagtttggtcataatcattccagccgcctggcaatgaccattcctgagtcattttttcacggacaagcaaaattttattatccttaaaaattgctgctcgcgtatcaatcttaggtgtttgatagccctcatcacccaaaaagagtgttttaatttgttctttaggtagtcctgtcctagctgccatcatttcgcctgcaattttacggattttttcatagcgctcacgatcaaatacatcatgaccataatgcaatcctgcttgagctaaactttgtaaatctgtcgcccacttgataaattgatcatctgaattcatttttattgcctttaatataaaattctaagaaaaataacaaattccaaattaataggcagattgaaatacctattttagattttatcacaacccataagtaacttactcctagtgcaaaaattagtagcaatgttaacagattacgaatactaaatcgacattcactcttattatatacttgatttatagctaatgagaaataatataaggccattgaaaaaataatcaggaaaaataaaaaagttttgtttatattctgcacttgtaaatactgtattgctactgttgacaaaagtattgcgactacaattgcaatatgactatacattgaaataaagcctttacttatctggtgatgatcaattaattcatctgataagacaacatagcttgcaaacattaatactaaagataaaaacaaaaaagcagcataaactaacggtgtcttactattgaaataacttgtcaaattaacaatagcctcaccaaaggcaataattacgattaaacttactctctctaccaaatgaggaaaatttactcgttcagctttaaacatcccttttaaaaacaatggcaaaataaaaccaacaatataaccacttatacaaaaataaattccaacagggtagccgatgattaatcctacaataattaagataaattccaatcctaaaataattaaaaaggcttgtttatcattattatctgcttttacaaatagatactgacaaaataaaattaagatcataacagccattgcaatattaaaatagtgaaaagtaattcgccattcagtattaatattgttgaaactgtcaaatcttttgtgtaaatagttctttctcgcaaattgattttttaattatttatttaatcaaagtaggattctaaggtgtcctgaacctgaccaaagcctttatgaattcgattgaaataacggtcattgtagctcattgcctgaatgccaataaaagcatcaagcgactgttcagttggaaactctgccttaggcttagctttgcgcttgatcacattgttaaatgattcaatcatgttagtcgaataaattgaagctctgatctgcttgggatagttataaaagaccagcagatctggttctatgtctttcaagcttctgataacatggctgtaaaccttgccccatttggtatagaagtcatgcaggacagctgtggcttcttctttgtttgtctgttgatgcacctgtttgaattcgttcatgatcttttcacgatcgtcgacgcgtactttagcgcagatattgcgcatgacatgaaccaaacagcgttgaaaatgagctttaggataagtcctggccaaggctgttttcatgccaacaacaccatcagaaagaaaaagctcaacttgctttaagcctcgggatttcatgttttgaagcatatctgtccagacttcaatgttctcgctaggtgcaatgcagtagtcaatgacctccttgtgcccattaggcttgatgccaatggcaatatagactgcttcacgctcaaatgtttctcggcgcaaaggaaggtatgtcgcatccaaatagacgcagaaaaacttgtcgcttagcttgcgtttgtggtaagcctcaacctttggaatcatctgcttggaaatatttgatacctgagctggactgtaatggctgccatacatcttttcaattagatcggctatttccctggtggtcacgcccttggagtaaagcttgataatcatgctttccaagatatccgagtgctgcttgtagtcaggcagcgtgtgctgatgaaattgaccgttgcgatcccgaggcacttgcacttcaattggtccaaactgggtatcaaccttgcggaaataagcaccatttctagaattgccagtattccagccatttctggcatagggatcatagcctagaaaggcagtcaactcagcttctagcaagttattaacagcctgttgtagctctttgcgcaataaatcatttattttgtctggattgaatagagcttgagcaaaatctttggtaaaatcattcatgaaggagttcttctttctgtatgtgtttttttgttcaaaccaatcatacgagaaaggaactcctttttctaatgttttaagaaataaatttaaggaattattcatccttacacaaactattttacagtctcatatatcttacaattttacttttcctaataagattattttatagaaatacctagttaatttgttaatttaatctgctgatcagctaccgatgtaatgaagtaaggatcatgctcaattagtaacatcgttggcttcacactcttaagaagcttaattaattgatcttgattgaatacatctaaataatttgctggctcatcccataaatataaattagcaggttctgtcaatgacttagcccaagctactcgtttctgttgtcccatactcattttttcaattctagttgtaaaatcagcacgcgcaaatcccattttcttaagattgctcaacaaagcttcataagacaaatgatattttttagcaaagtcttttaatgatccgctatacattacaaattcttgtggtaaataagagattttcaaactttcaattagctcataattacctttggcaattagattttgagagatacccagtaaatacttaattaatgttgactttccagaaccatttttaccttcaatagcaataatttcatgattattcaaagacaaagtcaagcttttaaatagttctctactattttttagttgcaagctaagatcattaagttgcaaaatctcacgatgataatctgcctgaaaattcatagtcatagtaggaactttttcaatattctttagcattccttctttttctgcaatcctcttatccatgcgattgcgtgcattaatcgatttcttcatcatctttgcagcttgatgtccgatcgctcccttatttaatctgtttttgtttgtaaccgcttaaattaattattgacatttagctagttcagttttacgataaagttgaattaaataaatgttcttcgaggcaaggtgaaattccttaccggcggtgaagtccgcaacccgcgaaagcggtggaatccgataatcggtaccgatagtatagtctagatgatagaagaataataaccaataagtaacgcttatttgcgtttgccttgattatttgactttgaatattattactgaacctcgagaatactcgaggttcttttttgttctacgaggaagtgattttaatggaaaaagataatttttatatgaatttagctttagaagaagctaaaaaaggtcgctatcaaacatggaaaaatcctatggttggtgccgtaatcgttaaaaacggtcaagttttagctactggctatcatcaccattatggacaaaatcatgcagaacgcgatgccatttcaaaattaaccccagaacaattatttaattcaactctctatgtcactcttgagccatgcaaccattatggtaaacagcctccctgctcagatttaattatcaaaagtgggattaaacgtgttgtagttggacaaatcgatccacacaaattagttactggaaaaggaattgccaaactacaagagaatggagttcaagtaactactggtgttttagctgatgacgcaagtaaacttaataagttctacagctatttttaccaatatgggtttccctggatcacagtcaaagaagcaactagtttagataataaagttgcaatgcgcggtcagcgaactccaatcactaatcaagcagtgtatcagcaagtgcattctgaacgtgcagattatcaagcaattatgattggttcttcgactgctatcattgatgaccctattttaagaactaatgtcaaaagtgactatccgccaatccgtattatcattgatcgtcgcggacggctgttaaatcatttacgacttcgcttattaagtgatacaaatcccacttggattttcactcaaaataagcaaatgtctaaaaacaactttactaattctaaaatcaaaattattcatttagcaacaaacaagatccaagaagtatttgattatttgagtacaaaagaaatccagtcagtttatgtagaaggtggccctactttggaaaaagcaattatgaatgaaatttttgttaatgaagtaattaaatatacggcgccgatctttcttggagatgaaggcgtaacaggtttagtaccaaacgaaactgtccctttaacaaatgttaaaaaaacagcctttggcaacaatgaacgaattgcaggtgaattaaaacatgtttagtggtctagttcgcggggatgctcatattaaaaaaattgataaacacaagcaaacaattaagctaaccgtttcgtgccctgcagactttactaatgagctaacggtcggtgattcaattgcaattaatgggacttgtttgacggttgaaagttttactgaaactagttttgttgtaaccatgatgcctcagacttataagaaaactgtttttaagaatttgcataacggtgatcaacttaacgttgagcgttcattagaagtcggtcaacgtttagaaggtcatcttgttacgggacatatcgatgatttggcaacagttactaaaatagcacagaatgaaaatgcaattgaaatttggtttaagtttcctgcccgattatcaacacagatcgtacctcaaggtagtattgctttaaatggcgtttcattaacagtgatggatgttaaagataacagtttttcggtaggtctaattccacatactcaagacgaaactaatttagccaacttacagataaatgatgaagtaaatttggaaaccgacattatcggaaaatatgttgcaaaaaatttagaaaagagaaattaaaatggatgttagaaaaattcaaaatgcaattcaatggatgaaaaatggtggtttagtgattgttgctgatgatgaagatcgtgaatctgaaggtgatatgatcggcttagggtctaaagttactcctgaaaatgttaactttatgaccaaacatgctcgtggcttactttgcacccctgtaagtaaaacaattgcccaacgtttaaatttctaccaaatggaacaaaataatactgatccatacggtacagcttttacaatcagtgttgattacaaaaccaccactacaggtatttctgcttatgatcgtgcggcaactatcaaggcaattgctgatcctacttccaagccagaagacttctttagaccaggtcactgttttccattagtcgctaaagatgatcaaatcaagaatcgtaatggtcacacagaagcctctattgccttagctcatcttgctggcgaaccagaagttgcatatatttgtgaagttatgaaagctgatggccatatggctcgtcgtccccaactgaaagaaattgctaaagaatatcacttaccatttttaacaattgcagaactacaagaatatattaatagtcctgtgagtaaacgctcagaatttgtaaaccttcctactaaatatggcaatttcaaaattaaggctttcgccaatgaaaacttagctattattaaaggaaagattgatcctaaaaagccagttttagtacgtcttcattcagaatgcctcactggtgatacgtttggctcaatgcgctgcgattgcggtgatcaattacatactgccatgaagcaaattaataaaaatggtagtggcataattctttatttacgacaagaaggacgcggaattggattaattaacaaattaaaagcttatggtttacaggaccaaggttatgacacttatgaagcaaatgaaattttaggttttaagccagatgaacgaaattatattattgctgccaagattttaaaagatctaggtattagtcatatcaatttgcttactaataatcctgataaaattgatcaattagaaaataacggtattactattgaaaaaagaattcccctggagattcctgctaatgaggtaaatcatgactatttagaaaccaaacgagataaattccatcatttattaggagcattatagtaaggaacacagaaatgaatatttacgaaggaaattttaaaaacaataattatcatatcgcaattgtcgcatctaagtttaacgaaattgttacccatcatttagttgatggtgctattgctagcttaaaacaatttggagtacttgaagatcagatcgatatctattgggtcccaggtgcttttgaaattggttttactgctaataagcttctcaattcaaataactacgatggtattatgactttaggcgctgtcattaaaggtgagactgatcattacagcatgattattcagaatgttacaaacgcaattatgcagatgaatcttaaagcagaagtcccaataacttttggtattttaaccactgagaatattgatcaagccttgcaacgatccggcttaaaagctggcaatgaaggttcctctactgctcagagtctattagaaatgatttcgctaaataaacaaataaagtaaatcaaaaagtgtctgggaaaaaactagcttccagatgaataaaaacgatcaagatttccttttttaagaatcttgatcgtttttttgttctctttaaaatttttaacaataaaaatcggcccttcagccaccttctttgacaatatttgttcaaattcatcatcataaaggcaattccgatatcggtttcgaccttctctttacctcgcaggtgcgttctgcgcatgccaaatacgttcttcaaatgtccgaaaactggctctacatcatattttctcatgccatagatgtgtctgccttcttcgctttggagaacttcttttgctttttcttttaaatattgccagttaggattatagcgaacttggcgctggcggccgctagctgttttagccaattgttccaattctggcgttagctggaactcgtctgcctcataaaccttaaaatcacggacctgaccagtagaacgatccttgcgctggctgtaatatttgaaattgaatctgacgccatgatgatcaatgtaataatcatctttttcattgtagtaccagttgattagcttagttggatcattcttatactttttggtctgttctttttcatacatagtgtagggaataaagtacttcttgtctggatatttttcctccagcatcgaataattgtattcactgccatagccagcatcggcgacgattttgtcaaacttgtccaacacggtcatttgatccaaaaccggctccaaagttttgaaatctgtcggattaggaaagatggcataatcaactacatattgatcggtcgtgactgcttgaatattgtagccaggctttaattgaccatttttcatgtggtcttccttcatatgcataaaggtggcgtcatgatctgttttggaataactgttgcgtccggcaaagatctcttcggcttcttcatatttttgcattcttggcacataatcttttcttagccggtgcagaatcttttttagtccacgtcgcttggcttttcgaggtgaaccgccaggaatggctttgttttcctgctcaatctctttagtcagcttgttaatttctgcttcagtttcttgagctaattcctttagcccctgactagtttgaactttttctttttccatttctttgactacttctttagtaatcaattcatcataaagttcaactgcctggcctttcagcttttcatgatacttttcaaccgctttgcgccagacaaatgtatagcggttagcatcagcttcaatcttagtaccatcgataaaagcagcaccttcattgattaagccttcatcttctaacaggttagtgaagtagataaagctctttttaatcagttcattggcatggctgcttgatctaaaattattgatagtatgatatgaaatcttttgctggtcagccaagatcatcattggcagattttcttccagcatcaactcaatctttctgccagaaaaaactcttctggagtaagcaaaaagcagtattttgagcatcatggctggatgataggctgggcggcccgttttagcagtcttgcctactaaaacatcttctggaattgaatctacaaaccagctgatgacattagccaaatgattggccggaatggcaaaatctagattaagtgttaaagcagtttgacctgtgatataattcttgtacatgttagtttccaccttttttattttgtgatgatttaataatatcaaggctggagctaaaagtatacaaaaagagcgttgaaacaaaaattcaatgtcattaagttaagacattgacaattaatattagacttttaaagcactgatttaacatttaattggttaaattggtgcttttttcgtacaacaaataaggcatagcacagattctgcttttttaagctacgcgatataaataatatacagctgatttgggcttaatatttctcttgtccttgcggcctggtctaattggaatggtataatagctgatctgaataaggatccgttcaaaatcttgcgttaaagaagaagccaaatacatgctctgaataatcaagcatgattgcttgaaattgatggcatattgatacttgcaatgcttttgcggaatataggcctgtgcatcaatttgactgattgcattaaacataatcatatgggcataaatttccatttcaataaatttatcttgtttggaatggaactgtacactgcctaaagaatacttcaatttcttgaaggaggtctcaataccccaacgcagatgataaagctctttaattctttttagcggataattttttcgatcaagattggttagcacaacttcccattcttctttgcctgatttggcatcattaattctaaatttgcaggctcgaaattttattgtgcataactcgccaaaatcccagcttagatcctgggtatttttagagcgatacttaatatattggcgataatgatgctggacatggtgaatattctcactggctttatgcgtgatgtagtaatagttagaagtagttaccaggcaggaaatctcacgatcacattcttgatcaggcaatgtcgttatttctttaactccgccttgtccagccttagttcgtattatgtaatgacagttaggcaggcgattgcagttttcaatcatattgaaactagtgtagccacgatccattgttacaatatatggaccacaattcaaagctttaagcatttgaacagccgctttgcgttcatccatttctgatttaggctgaaaaatacaatcctggtaggtattattcaatagatcatataaggcattaacgtgaatttgacaatagggtttctttttatgagaagaagcttgtacaatgttattcgatttcggattccagatttgattaaagtcagagccatcaatggcaaacaaacggtagtgatgatcaaaaagttgaatattaaatagattttgattaaaaacagtcagaatatgtttaaaacaagcaggagaaagctggcttttgcgttgaacataggcagaagtactaactactttatcgttctttttagttgcatcttcgccaaaagctctaaagagttcactgtttaaattctgaccttgcatgttaattgtagttttaaggactgtcgctgcatctaaagtgcgtttcctggtaaaagcatgaggattattaataaaatcgtgaatatgatccccagtattattgataatttgatcaagacgttctagaatattcttatgaagggctttcataattaacaccatctttctggcaataattttgaaggtttaaaatatataatatacgcgtggtgctagttaaatctttctagacaataagccaaattataagctaaaattgcaatttccaaccggctttgaaagcctatcagactacgtgctcgattgttctcggcattataataggtcagaagcgaaaagtcgctttcaattgttctgcgaatagccatcaattgatgatcattgtgctttttagctcctgtcatatttttacgatatggtgtccaaagttcataacccatttgttttagctgttgatgcagttctttgcctaaatagccttcgtcgccaagaagatagtaattagatggatgggcattttccagcagttcaactgtctccttggcatcatgaactgatgcttttgttacgacataatcaagaatgtaaccgtcatcgctaacaatggcatgaactttgaaaccatagaagtaaattttcttggtggccttataaccaatgttggcataaccgcgaaaaattttagcacgatagttgcgaattggttggcaaacaggtaccggaaagctgtcaatgatcaagaaatgtccattcaggtcaacctttttattcatttcttgccgtatctgataaatcaattgcaatagctgacgtgaacgccgattaaaacgtgagtgtgataaacaattgaaacattcacagaatcttctttgtgattcaattcctgtcttagcttgccagataagtaaagccaaaatcagactgtccgtagttttaatttgatcaatatttcgccgatgagtaaactcagccggtgcatacaaacgataccagtgccgacaaattatcactaaatctttaaaactaacttgtaaatggtggctaaaacgcttaagcttaaggcagttcaatcagatcagactcttttctattattactatttacaagtcgagtctaacaagattggacttttttattaactaaaacgatttaactagcaccatgcgtataatatataagataggcgaaaaggctggtcttttcgcctttattttatacaaaaaaagagatcgaatccaaatgattcgatctctaaaaaagcacccttaattgtcaatgtcttaacttaatgacattgacaaaaattcaacgttcttttttcatgatctgagacttagttttttcccagacacttttttgtaatattgaatatgctccttaatagtccaagaatatttaactagtactacgcttttgaattacctagttctgatcatcgttataaccaaaaatagttaggaactgtaagaacaggttgacaaaatctagatataactacaaggcacccagaactgctaagccattggttgaaacttctccaccaaattgtaagtaaatattcttcattctttgtgcatcccaagcggttaaaactgtaaaaataatcactgcaataaacgagaaaatgtaactaaccattgggttctttaagaacaaattaactaacatcgccacaatcaaaccaattaatgcagctgaagcatacgaaccccatctactcaagtcctttttagttaccgtcccgataattgccattgccacgaatacgctagccgaagcaacgaaggccgaagcaatatcttgccctgtataagcgcctgcaataaaggcaaaagtaattccataaataattgccgtaattatcaataaaataaagctggctactggagttcgagttgctctaaagttaatgacaaaggttaatgcgattggtaacaataatagcagccacatcgtccacggatgactaaccattaaggcaaccatctgcctagcaaaaacagtcatcgtaagataggcactcaaggcagaaacaaagacagccagtgccatatagccataaattttacttaaaaagacatttaaaccagatgcatcaactacatgacgacgacctggattttgatcgaactcatccatcagtatttcctccaatctgttagatttctttggttgcttttaatgtatcacttaccgagattaaagagaaatatgacggttcgagatttcttaattcagttttgcgaccaataaattgattcatgatttaaacccttcggtaatcttaattgctatacttaacaaaaaagagctaaagcaaaaatagagtagagggagttttataactcgcccctctcattgcaccggacgtacggttccgtatccggcgctacgtttgtgattatttacgagataaataatattctagcggatcgaccaagcctgggcgatccgctttgcttatgcccaatacttttgggctaagcagaaagttaatgacatgacccgtacttcttttataccaacctaagcgcgtattagctactttatgaatatcttcatcactaaaattgcactttagtgccttgttaatccgcattaagttaatgtatattcgttttggtagtttccattgtttaatgattaccacccgtactttatgacgcagccattgactgaacttaattagaaaatatttcatgtcgccaactctaaagtaattgacccagcctctaactacttgatttatcttagtaaagactagtgatagaggctgagcagctgcttttctgcgacagagaagttctctcatcttgtcataaagcttgattttgcggtcatctcctggctttgcttgccagtattcgccacttttccagaaggtaaagccaagaaagttgctcttggttggtcgtacaactttggttttggttgcgttgacctttaggaatagctttctttctagccatgatgaaattgaattcatcacacgtttggctgatttaccgcttttgaaaaagatattgcagtcatcggcatagcggacaaagcgcaggcctctttgttccaattctttatccattttatctaaatagatattggatagaattggtgaaagagggccgccttgtggtacacctagtttattaggcttaacccaaccatcttccattactccagctttaagaaaggctcgaattaaatggagggtggttttgtcatttacttgctctctaattattgaaattaatttatcatgatttaccgtgtcaaagtatttctcaatatccaggtcaacaacccattgatagccttcgtttaaatattccaagacttgttcaatagcgtcatgagcactgcgtccaggtctaaagccatagctatgctcactaaaatgaggatcatagatcttcattaatacttgggcaatagcctgctggattactcggtcaacaaccgtgggtattcctaaaggacgtttcttaccattagctttaggaatgtagactctgcgaacagcttgcggacgatacttcatcttcatgatggcgtcctttatttctacttgatgctttttaaaatagctatcaagctcatcaactgttctcctgtctacaccaggcgctcccttattgattttgactctcctgattgcttccttgagattattttgacttaaaatctgttcaattagttccatctcgtgatatctccatttctacttgtaaatttattcagaattgtcccaattgctttcaccatcaaagagttacgttctctttgtgctaggctatcctcttatccggactgtctgaacattgcttatagcgagatatgctcttacaaacattaggcccttcgctccagtttcattacaaaaccttcagcactactacgacctcagctgacttctcgcgattaacctttttcgaccaggcttacgatcgctgatattaaagcttactcggtttcacctgtccacgagatctctcggggtaagacattcatctttaattttccactgccccctggtttaccgtcttggttttacggttgtcctttggactttaacttgtgctgcagtctcatccaccatttggcctgaccaggtttctgtacgtaggctcggaaaactcgctagccacttccttcacccatagcgtcaccgctaacggcttgtggttcgctacacttggcgacaactacccgtgatctagactttcactagactagacaaatgccatgcccgacacacaacaaaaatagagtcttcactgaagactctattgctttttgaatattaaattaatcagtttctctttctaaaagctgcaagactgaatattcctgcgattgcggcaaacacagccccaatagccgtcaacccagtttgtttttcaccagtttgtggcaaaacattcctttgtgtaactgctttttgaagtttaacttctttaacagataccgcacttaccttagaattggctaacttaactggtatttctttcttagtaaattgacatgatgacactttttcactctttggagcaacagtcttattctttgctactttatttattttactcgttttctttgtcttatttacccgctcagcttttggtggaatatttttttcttgcttgtctatcgtttcaggatgtggagccacattattttctgatggtgcagttggctgagttggagttgtcggttgagtcggagtttctggtacatcaggtgtatcaggctgtggtgcttttactggaaggatgtctacaacatagctattttcaatcttcatatctgattctttagaaccatttaatctataggaaactgtcacaatatatttaccggctggagtttgaccattaattttattaatcttatttctgaaaattgaaagcaccaaaatcaagctcaagtcctgtcactattgagctttcttagacgtaattagtttttatatgatctgtttcagtgcaatttgtatgaatcgtggcagttggttaataaagtcattgattacttcatctatcttttcaaaactattctgtttaagctcttttaattctgaaattaagtagaccaatgcatctacgaatctaatatcaggtaaggattcgttcattagatagaataaatctccgattgtcttatcatctgtattttgtctttcctgccaggtcaatagatcataagttattgctgtaactgcgatatagccacattggccatcatagctttgaacttgagatttatctaaagcaagatattgcttagacgtcttaaaatatgtttcaatttgccatctacgaccataaagttggatgatttcttcagggctaagctttgtctgagtagtagctaaaaccaaatgcttgttcttgtttccacggttggagacaaagacgagctttaataaaaagctatgtccatgatattgagcctcaactatgcttgaataaagataatgtttctttttacggatgtttgaagcagccaaacgatcatacaagtctttaacgctatagcggcgatggcgataaatgtaataaatctttgaactcttcttgatcatgccaagtccatctaaaccgatcttctttaaaatccaaaacattcttggagaagaaaaccaagaatcgaataagacgtatttagcttctactcctaatcgtaaggcttgtctaatcaactctacagttacatcattcatctttctctgagcttgatttctccttttaccagaaattgaacgttcatcagcagtaatgggagcagctccaatcatatttttcttggttttggttgacatcaaggcaaagttaaccggcaagaaggtattgccatcgctccagcctaaagttaaaccacgatatccgttcaaatactcatgcttgtcatggtcatagactttagctagcaattcggtctttttagaaaaagaccgagccatcagcgtatcgtcaacgataaaagcaagtcggcgtcttttatcgataaatggttttaagcagccaatgagccgggctgcaatcaagcataatagtttttgccagttgattcttccatcgttaagtacattgcgagcagttctaacggaaaaacgtttgtcatccttagctctgaataaagaaagccgagcaaaatgtactgacatcagccaagagataatcatggttaatgaaacggtggatttacgcttaaaattgacttgtttagttaacttagctagaccaattagattaataaatgaagaaattaaggatttagtatcattttctgtgtcgatttgttctatactgttcattgcgcaggatctcctttactttttaggtcgacacttaaagtataacgcagagagatcctgcgtttttatttttgataagaaaaagccaagaggcgcggggaaggagcgttaatcttagctttcaagtttcagtcttatttcctttttcatcgatgatgccaaccaattgaacatcttgtgcattaactggaatattttctaataagtatccattatagacagcattaggatttcttacattaaatactccagttacaccttgatgataattccagtcttgcgcttctttagatccttggtttaaagtctcatctttagtagcgataatttaatgtacttcaacatagaaaattctcttattctgatcttctttattaagtccatgaataattaccttatgactggtatttgtatcataactataaaatggcattaaagtggttaaatctcttgcctgcggattcactgaatagccatatttatcaattacctgttgaatctttgataattgaatcttatagctaccaccctcataaaaagcttttccacttgtgtccaatatattaccagaattagtaatctgaataacttcaccaacttttggtaaactctcaataagttgtggtatattgacagcatcataactaccatcttgattcctagttaccaaactaattggagtattctgagcttcatcaactgtccaaagcttttttggttgtttatatgtgcgtacataaatactctggtcgttttgagcttttagatctatttcattgaattgatttcctgttggatcaatgatcaagggtacattcatttgcgcagtagtttcaccaggaataactcctctgaacccaatctgtcttacgttactaattgcggcagcgccaaagtttttcatcatttcttcataagaataccaagtaccattttgggccaagtaataaactgacaaagcattatcattaatcaccttaccatttttaataaagactacatttgctgccttagtactactgatttgcaaacttagtttttccttattggaataccatgcattgatcattaaaactgcttcatcattaggattagggttagagtcatttttactattaccaatcatttgatcagttttagaaacattttctagagttaagtgagcctcagggtcttgagcattttgctcaattaaaatggcattattattcttacctgcttctgcacttgaaactacttgagtctgattcgtgttcttgttcttagcggtaatagaataatcatacttaattgagccgtcagccggcacgttagttatattagcatttttaccttgtccatttgtttttagtccactagttgtattattttcaccgagaataattgcttgatcagttttatcctcagagtctaatttctgatacgcagctgatatttctgtcttaattttattttgatattgatcaccatttctttcaaccttttcaacagatgaactattttgagtagattgctgtttagattcaacagttagaacttgttctgacttttctggctgattagcagtagtctcagcagcatgtacttgacttccactaaaacccaaaaaagtcaatccaattaaaactgaagcagttccaatagttaattttctaatcgaatacgtttgtttttgatcaaatttatttttatctaacatttgaatcacccttatgtgaaaaataccgtttctcttttcgccattataataacacccgttgtaagtgccttcaaacattatgcataatttttaccaaacaaaaagcatgaccgaagccatgctttttatcttttatgtatctacttatttttgaactttttctatgatcatccgaataatatttaatataaacatccaagcaatgttataaatccaaatctcacagatcatccatagtgaaatccttggtacaaaccagcccaagtagcatgcacatgcagcaaaaatttgtgtaattacaattgcccagaaaagtattggagctggaaatggtctttcgaagaaccaacgagtttgacgagtaacaaacaatagtaagtgcccaccagcaactaattgcaagaacataattgtctgcaattgtgaaaggtttccaacttggaaaatgctaattgagccaggatttttaactgacatatatcctataaatagaagcaacattgattggattacagcaaatacacccaaaattgatgaagttgtaagaatcttcttcatctgccatctgattggcttcttagaaacataggtattgtcataagcaatagtcatgattggtaaatcatcaagtaatgacataaccacgatcataattgctgttaatggctggaagttcaataaaattgatgacaaaactaccaagaacataatgttcattgtcaaagcaacacgataaattgtgtaacttgtaattctggcaaaaatctttcttgcctctgtgattgcagtttgaataactgacaaaccgggtgaagttaaaattaaggcagcagcacttctagcagcatcagtagctccagcaaccgctgtaccacaatcagcttgcttcaaagcaggtgcatcgttgaccccatcaccagtcatcgctacaatatgaccttgcttttgcaaagttttaacaatcgcatatttatgttctgggaaaactctggcaaaaccatcagcttgcgcaatcaacttttccaaatcggctggaacatgatcaggatcaagattcttaggaaaaactttagtagcgttataaatattagtacccatgcctaactttttagcagtttcaatcgcaatcgcggtgtcatcaccagtaatcatcttgacactgataccttcacgcttacaatcatcaattgttttcttagaatcgtcccgaggtggatcgaacatcgacaatacaccaagaattgtccaagtcttgccttgatccttactttcagctacacctaaggcacgataccctctttttgctaaagcatcagtggtatctagaactttcttttggacatctggatcactacttaatttagctacaacctggggagcacccttaatagcccataattcttctttagtattattattaattaaatgagcttcaattcgcttagatactggatcaaatggaataaacttttccattgtccaatcagctaaaacactctgatctttcaaagctttaataactgcgttgtcaattggatcattatcttctttccttgaagctaaggcgccaattttaattacatcttgagcatctttagcgttaattaaagttgtatcacccaaggttaattgatttttggttaaagtaccagtcttatcactacataagatgtctaccccagccatttcttcaattgaagctagtctagaaacaatcgcctttttcttagataggttcaacgcacctaaagccaacgtaattgaaaagacagttggcattgcgacaggaatagaagcaaccataattaccgctaaaactacggcaacgataattaagaaattaccaatcttaaacattgcttcttgagcaggacttttaccaccagctgaagcaactaatttagcagttttaccaaagaaagtattagagccagttgcaataacaacaccggtcatctcaccttttttaacaatactgccagagtaggcctcatcaccaacttttttagttactggcaaactttcaccagttaaggcagcttgatcaattgaagcgtagtcccaagcgcaaatctgctggtacgatttgccctagccgaattttaacaatatcgcctggaactaatttgcttgcatcaatcgtttcaaatttaccatcacgtaaaactgtagcagttggagctaagcccttcttccacgctgctaacgcatttgacgctttacgagattgccaaaattcaatacaggcattgaacaacagcaatacaataataatgaaaaagtcatcccagtggccaataattgcagaaataattgcagctgcttcaatcatataagcaattggaccagtaaagtcttcaaaaactttagccccattggttcctgcttagcagtaatggcattcggtccgtacttttgcaagcgagcctgagcctcttgagaagtcaaccctttttgtggatcaacttttaacttttttaccacatcttgaatatcatctttttcaagatctgtcttctcttgtttactcattattctgacctctctactttattaaacactcagatctagttttagtataaaactatttcagaataatgtttaagagaaagccttacaaatttgtcattatacgataaaaaaacaattattaaaatatggttattttattttcaagtagctaatgaccttatgaaggcaatctagattccttatttctctgcaaaaattgtttttcagcgagaaattttgcaaaaaacacagccaaaatgtatcactaggtttggttatatattttttctataaaaagatttattttttagcccggatttaaaattgaagtgcaacactaagtgttaaacaaaaaggccatgaagacctaaacttgaagtgacgaaaaatcaagaaaggaagatctttatgaccaattcaaattctagcatttctaagcactatcatcaattaaccagcgtacaacgtggacaaattcaagcaatgctggattccggcataacttcccgtactgttatcgctcaagaagttggctgccataagtcgacaatcagtcgcgaaatcaaacgcggaagcgtcctgcaaagagacagcagctatttattgtatgagcactattacgctgatactgcacagatttattatgagaagcgtcgcaaaaactgctatcagcgcaatccattgaagcattatgctgtctttttgagaatgctctccagacgctttaaagctaaatttgatgccaccagcatcgatgagttcgttggtgaattcaaaaggactatgccaggctacccttgtcccagcacaccaactgtctatcgctatattgatcagggcttgctggacataagcaatattgatctgcctatgaagctcaaaagacgcaggaacaagcgtcatcacagccatggcggtcacgctttgcacaagaagcatcttggcaattccattgaacagcgtcctaaagagattgaagacagaaaagctccgctgcactgggaaggagatctggttaaaggcgtcagacgcaagaatcagcctgctttaatgactttgactgaaagaaccacacgctttgaagtagttatcaagattcctgactatcgggcaagcacatgccaaaggctgcttcaaaaggagattgacagacatcctgcctggtttaaatcaatcacgtttgacaatggctctgagtttgcggatatgaccaagatcaagggctgccagatttactttgctcacccatattctccatgggaaaggggcaccaatgaaaactgcaatggtcttttgcgtcaattcttccctaagggcaagagcatgaaagacaagtcaaaagcttatgttcaacaggcaactgatgccattaaccacaaatatcgccgaatcctccaatatcacacagcagaagaactcttcaagcaatatatttcctcatagcctaactgttgcacttaatttgacaattcagggatttattttttagttattgaatatttaaataatgtttcgatagtctatttacatgctaaacggtcattatgatgctttgatttaaccaattcttatgctaatcatgatcaaaaaattattcatcatcaatgatcaagaccagatcgtgcaaaaaattaattctaaggtcagaaaaggcattcatcatctcaacgttatccttctactaattctctaactatattgtagttacttgcatcatctgaatcagaaatatctgcactagcttttctctcatttttatttactctttattttttgcgcttccaatcttatcttttaaatccaaagctttttcataaataaagaaaccaattacacatgtcaatatatcactaattgcttgagaccaaacaataccgtgatagcccagcgtcatcttcatcaattctagaaccacaaaataaatcacaccttgtctagcgattgccataataaaggcaccccaagcattaccaacagattggaaaacagttgtataaaccaatgcgattcctactacaggcgtagtaacaatcgtagctaacaacatgtaactaccggcactaacaatatccggctgattcatgaataatgctgtgacaggacgggcaaaaacaattaataatccaccaacaattaccgcatatacaacttgaactaaaatatcaaagcgaagaatatctctaagccgccgccaattctgagcaccatagttgtagcctaataaaggttgtgcaccaaaggcaaaaccaacaatcaccaaaatcacaattccatatattttttgtgtaatccccattgcagcgaccttatcagcaccataaattgccagtgacgaattcaataaagccatgccaaagctttgagcaaaattagtaattgatccaggaataccgattgctactacttccttgattgattccgcattaattttaattaacttgggatctagagtaatgaatcttgctttttgcagaatcataattactaaaatcaagtcagttacaacataacctaaaatattggcaattcctactcctgtagcaccccattttaaaacaaataaaaaaattggatctaaaatgatagctaaaatagttcctgtcattgtggcaatcatcgcctcaatcgctaatccctctgttcgaattaagttctgtggaataaagctcagaataataaagactgctccaatggaaagcacacgataaaaatcagctgcatcgttataagttgccgccttggctcctaatatagttaaaataggatgttcaaagattagcaagattactgttaaaaacagaccagtaatcattccaccatacaagcaaaaactgctgattcttttgctgagctcgtattttttctcaccaaataagcgggaaataactgacgaaccacctaagccaaaaatgtcggcaacagctattaaaaaagtaaaaagtggcgcaccgatcgtaattcctgcaactagattagtatcgcctgttttggcaacaaacattgtatctgccagattataaatcatggtagtgatcatacccaagactacaggtagtgctaatttaaaataaacttgcttaattggtgcctttgcaaataaatcttccatttgtttccctcacaagaaaaagcaacctagaagattcttcgggagtcatcctcacgattctaagtcgcttatgttacttgatattcatgtattatatgttaatctaaacaaattctttgattagatgcaatggcgtttttaattcggtaagtgtcattgttttttgtttatagcatcagagaaatctccatctatgctaaactattaccaaaatattgaaggaaaactattatgcaaattaaagaaattatcaaacttaatcaatcaactgagcaagaacttttaaccatctgggaaagcagcgtccgcgccacatataaatttttaaacaatgatgaaatcttacaaatacgcaattatgtaccacaagcgtttaaacaagtggagcatttattaatcattatcgatcatgaacaaattaaaggcttcatgggaattaatggtcaaaaagttgagatactcttcattaatgccaaagcacgcggcaaaggatacggcaggaaattgttgaattatggtatgcaaaagttaaacattgatgaattagctgtcaatgaacaaaatccaaaagcagttggattctatgaacacatgggatttaaagtagtggaacgttcagcaactgatggtcaaagcaatccttatccaattttgaggatgaagttggataaagaaaagtagtaaacagttatatttagttattcctttttcccttgacaaaaatatttttaattttcgagtaatatcatttgtctaacaacccattcttctatattatagaagacgctgctgatacggatgtataacggactgataatcctttccgtaaattgcctgtaagtcagataaggcgaacagcaaggatacctgctgttttctgaatcttggagatattcttatcagagataggtccaaaagactttctgccaggcgatggtagtcaatgtatttcagcgtaaggctttttctgagctggcaagcacaataagttgatgtgaaaatcagcttgcatcagggtttttgacctaatattaaggcggaaaacttaattggaacctcaatgtaatgaccaacaagcttgtttgctgtgacgtatgcgatcaaaagcatgctataacaggtcagaaaagaacgagtagcttaatcggcaagattaaatgatactattaggtacaatatatagaacgcacatcaagtgaaagtttacggtaagcaatccgtttaggacttcggtaggttctttgaacccaacgcaagaaagaagcataaatagctaatctgtgggcggtcttgttatcctatggctgaataaagaaaagaaaagtatgaaaagcatattttcctaacgttggatgcaaaaatgattagttgctaataacaaccagtagcattaattaaaaggagaccggtttgtctatgaagacagctggtctctttttaatattctaattattttactgtattatcacctgacactgtgtgcatccctaagtgactgccatttgtctccttacctacctatgcatgagttgccttaccaccaaagattgaattatcaccgactacagtcttcaaatcacattgatccacttcaatattttcagccaaattatcacctgaagtcgttgccacatcaagatcatcaagaatttggctatctttaatggtaaagtcaccgctaactagcttaatcttaccacgatttagcaataccttctttaatttaatatcacctgaagtttcagttattgcaacttcatctacttttactttcttcaaatgaagatcaccactaagagcagtaaatgttactgtctctaactcaacttgttttacaacagtgtcaccactagtcaacttcaaagtagcgttaactaatttatgttctaccggcactgtaacttttaatgcaacaatatcatcttgactcacaatactgatttcaacatgctttcttttccagaatttaccattcttgcgttcaaccttaggttcttttaattcaagagttttacccgcattagtcacaatcggcctcttatcttctggaccgtggtaatgtacctcgaactgatcgccgccaaccaatgtaaaatcaatatctactaaatccacgctcaatttgtcaaagctatcattgcttaaaactttatcaacaattttcacttcattgtcttcatttttgtcaaaaaacattttctttctcctcatttttaccttttagctattattcttatttttctttaagtttactatcatattgctatttttcaaccgtaatttactaagtggtcaaaatttgcggctgaaatgcaaaaatagacaacttaagttttaacttaagtcgtctatccttcatcctaaaattttctttttcaattcgtctaaacgatcaattttaaacgtgaacgcctgtatccctaattcacttgcagctttggtattattttccaaatcatcaacaaataaacattcttctggctttaaatcatatcgttttaacaaacattgataaatctgcttatcaggcttcatcattttttcctgtgcagaaaagacaaaaccatcaaaataatcacccatcgaagaatttttaacaaagttagcaaattccatccctgtattagacaaggcgtagatatgatagccttgctttcttagttgatccataaaacgaaaaacaggttcatagaaatctacattttcaggccaagttgtcataatttgcttaaccttcttctgcagctcaacaggtacgcgactaataaaaatcttagtcgcctctttttcatcgatttttcctgcatcaatttcagaccattcttttgattcaaaaatcgtttttctcaataaatcatgttcttctgatgttaattgataatgatataaaatttcatcaggattgtaattcataatgacgttgccaaaatcaaaaataatattttttaacataaaatgtcccttctaatacttttaattcacatcttaattttatgctttcttgtatcactgcgaaagaaaaataaaaattgactttttctttttatcaaataaacacaggataagtgaagtcattaaatcttttagccaagagcattgtaatagacacataatacagtataatgattattatcaattacataaaaaggatgatgattttgaataaaaaagcattcagcctagacggcaatcaattaaaaactttagcagttgtgtttatgatctttgatcatatctacagctatcttctattggatattctaccaaattggtgcagtttaattgctcgcttcgttgctccacttttcgttttcatgttaattgttccccatgaccctggcattgcatatactgcataaaagtcattgccagtaaacttttcaagatgcgttttgtctttgccaaattcatccttacctgtctcagtagcattttgatattttacaaaagtatcttttagactatttgcatcaatcttcaatttattagctagttcaacaattgaattggcatgtacatatacttggggattttcttctactttatctagtttttccttaaatgatgaatccatttttttgccatcataaatcaaataatacttttcacttccatgcttgtacatttccgttcttaaattcaagaaattatatggtgcctcattagaaaaacgtttgccattctcatcaattaacattgtttttgaataatcaggtacagtattccaagtgataaataattgtggggcaaaatcaatcgttccattcttataaacatcattatttgaaaactctgcattaacagctttcagtaaactataaccatcaccagtattggcaggactagcttcgttaaagacatgaaccttagcaacagatggtgtgaccttattaagaagatcatccttttcataagaagcaccgcctgtggcaattactacagctttagcactaatagtaaattcacctgctgaatttctcacttgcaaccctgatactttggttccatcatctattatttttgtaacccgactgttcaaataaaacccgccgccatgttctttaatgtaattagccagcatttctactaaatgtgcgccattagtgaaattagcaataataattggactatcagaaaaaatacttacttgcgaatttgttaaggctactaaatcatcgaatgtttttccagactcttctaacaattgttttaagaattttcgatcgtgctccttagttgcatttttattaacatgatcgacaaagttcaataaccttatcattgtcggtagctataattacagtcgcattattaatttgctgctttaatccttcttcactcgggtaaacaccccaatgctagtcgggactataatcatccgttttttgatcaagacaaacttgtttgtaaaaagcacaaacttggcttaaatcttgaacagtagcagttcttatttgcaaaaaaatcccccttctattctatagttttcgattataacaaaaatgcatccccttcccaagtaggatgtggacgcattcatttaatctatattttattcatcaatcttaggggccttgccgatttgagcttgcatcatccagattctcttttcaatatctgtatggcatgacgttaagatatcatttgagccatagtcgccttcctcgtcacttaccttgatcccttcttcataaaggtgctccaaataacgataatcagcaatgatagtcgcaaatctttctctagttgaaattccccattcaccaggatgagcttcgatcttagtatgatcaagcacttcctgtaagcttgaatatggtgacccatcaattgtaatcaatctttcagagatcaagtcacgttgttcatcaagttcatccattacctcgtctaaatatgggtgcaattttaaaaattcaggtccacgcatataccaatgttgttggcggacaaccatcattaattgagtagtatcagcaacagcttgatttaatatttctttggttttaggatacttcataaattagccctctttcaattagtaacttactttatataactattatatattttgttatcgcttttatcaaattatatgttttatgtaataaaaaatgtgcccgaacaagcacatttttaagtaagtttaaaagaaaattttactcataataatcatgaataccaacaaacaagttgagctaactgcggcagccccaaagactgaaccgccacgcttaaagattaccttgaagttaacggaaattcccaatgcagccattgccatccctaaaaagacatatgctgcttgcactaagaagtctaaagtccgcgcagacattggtaaaaatgtaccaataatactagttaagataaatccacccaagaaccaaggaattggtaatttcttcggtgctctagtatgttctgcttcactttccgtaaccaaacgcttttggtaccaatagcccacaattaaagcaaccggtgctaaaagtaatacacgagataacttcataattagagcgctatccaaactgacttcaccaaaagcacttcccgctgcaaccgcatgagcaatttcgtgtaaagatccacccgctactaccccatattgtgtatcagttaagccaagaagcggtttgagcacgatttcaagtaatgtaaacaccgttcccatgacacaaacaacagccaccgctagaacttcgttttctctttttctgtcttcatcgcttgtctcaatttgtggtgacacgcccataacggcagctgcaccacaaactccacaaccacaagccgacaaaatagctaactcatcttcagcaccaaacttacggctaagccaataagtaagcacaattgttccactaactgccagcgccgcaaccagtatagtcttaactcctgcatcagccaacttagtcaaattgagtctaaatcctaacaagataatccctaatcttaaaaacttgttggaaataaaacccatgccagctttcgcttcagcttgtacgctctgaggcgttatttgcagtgcaatccctaataacaatgcaattaccaatgccccgattaagtttacgtatggcaatttagccaagaaaattcctgctacagaacaaaataaggtcatcgccgtagctaaccagaatgatttagttttaattatgtttgtcaacaaaaatccctccatatgtgatctgtttaatttgacaaacacaactccctttatgatgattgtaataagtatactattattttctattcttgacaaggcaaattattaataaattcacattaactaaaaataaaatattttggcattatttagttaagtaggttataatacttttgttacggagtgttggcagagtggtaatgcaccggactcgaaatccggcgaaccaagttttccttggcgcgcaggttcaaatcctgtacactccttttgtcaatatgtggaaaagaccaagtgcaatgcttggtcttttttatcttagtcatttttaatatttaaatgctacacttgctaatagcacattatttaaagatatagaaaagagattatatattatgtgtacttcaattattttcagtccacaagatcactattttggacgtaacctcgatcttgagattactttcggccaacaagttgtagttaccccacgcaattatgctttcaacttccgcaagatgcctgaaatgaagcatcattatgctatggttggtattgcacttgatgctggtaattatccgctctactttgacgcagctaatgaaaaaggtttaggcatggcaggacttaactaccctgacaatgctacctactatgatgaagttgccaataaagacaacattgcttcatttgaatttattccctggattctgggtcaatgcgcaactgtagcggatgctaaggtattacttaaaaagatcaacattgttaaccttaatttctctgacaagatgcaggcatccccacttcattggttaattgccgataagacaggtgtttcaattgtcgttgaaaccgataaagatggaatgcacgtttatgataatcctgtcggttgcctgactaacaatcctcagttttcatgtcaattatttaatttaaataattatgctgatgtttcacctgcaatgcctaagaacaacttttcaaaagaggtcaatatgaatggctacagccgtgggcttggttcacgcaatttgccaggtgggatggattcagaatcgcgctttgttcgtgtagcttttaacaagttcaacgctcctgttggtaaaagtgaggaagaaaacgtagacaattacttccatattttgcattctgttgaacaacaaaagggacttgatcaagttggccctaattcatttgaatacactatttactctgatggtaccaaccttgacaaggggattttctattacactacttatactagtcagcaaattaatgtcgttgacataaacaaagaagacctcgatgctaaggaattaatcaagtatgatatgttaactaagccaacatttaatcaccaaaactaaataattgaaaaataatgttaattttattcccggatttaaaattgaagtgcaacactaagtgttaaacaaaaaggccatgaagacctaaacttgaagtgacgaaaaatcaagaaaggaagatcttcatgaccaattcaaattctagcatttctaagcactatcatcaattaaccagcgtacaacgtggacaaattcaagcaatgctggattccggcataacttcccgtactgttatcgctcaagaagttggctgccataagtcgacaatcagtcgcgaaatcaaacgcggaagcgtcctgcaaagagacagcagctatttattgtatgagcactattacgctgatactgcacagatttattatgagaagcgtcgcaaaaactgctatcagcgcaatccattgaagcattatgctgtctttttgagaatgctctccagacgctttaaagctaaatttgatgccaccagcatcgatgagttcgttggtgaattcaaaaggactatgccaggctacccttgtcccagcacaccaaccgtctatcgctatattgatcagggcttgctggacataagcaatattgatctgcctatgaagctcaaaagacgcaggaacaagcgtcatcacagccatggcggtcacgctttgcacaagaagcatcttggcaattccattgaacagcgtcctaaggaggttgaagacagaaaagctccgctgcactgggaaggagatctggttaaaggcgtcagacgcaagaatcagcctgctttaatgactttgactgaaagaaccacacgctttgaagtagttatcaagattcctgactatcgggcaagcacatgccaaaggctgcttcaaaatgagattgacagacatcctgcctggtttaaatcaatcacgtttgacaatggctctgagtttgcggatatgaccaagatcaagggctgccagatttactttgctcacccatattctccatgggaaaggggcaccaatgagaactgcaatggtcttttgcgtcaattcttccctaagagcaagagcatgaaagacaagtcaaaagcttatgttcaacaggcaactgatgccattaaccacaaatatcgccgaatcctccaatatcacacagcagaggaactcttcaagcaatatatctcttcataacctaactgttgcacttaatttgacaattcaggtgttaattttatttaaagattagcattatttttgtttttccggttaaaatagattgtacttatatagtaattggggattttcttattaatgaataattattttgtactgctactgtctgcggcagttttgctctggcttatttttaatatcaaaaattcacgtcgtttcaatctatttgatcactggcttcaccaccaattggtcaaacgtcatgattgctacagctggcaggttatcgcttttattaatgatcctaaactaatggtcgtttgggatgtattattagcaggcctacttttaaacgaagaacgaaatctaaccgctctttgggtattaggaactctaggatttgctgacatttctggtattattctaaaaaaacttattcggcgcaagcgaccattattacattccgataaagaagatggctatagctttcccagcggtcatgttttaggtgccacaaccatgggcttaatcgtactacaactatttgccaaagatcttggaaccggatttgttattgccgtagtagctatttgggcaatggtaattttctctcgtttaagtttaaaggcccactatccttctgatgttcttggtgctactagtttagcaatcgtttgtttcagtatttcgcagcaactatttttagcgatttaaaaaggatcacgttcagcacttgagcgtgatccttattttttattcatgaaagcctaccataatgccgccttcttcagcatagaaactacataaagcatgcattggacgaatagtaatttgagcttcagggtattcctccaatattttatttttaattatttctgcatctttttcattttcgcaatgatcgattatcacttcgccaccgtgataattatcttccttcatatacttaataatttcacggatggcctttttcattccacgagccttagtaagtggctcaagttttccttctttacttgctgttccgatcaagttgattttgagcaaacctgcgattttggctacagctggtgaaacacgaccgtttaaagataaattatgtagtgattgcaaaacaaaaagcaaatgagtctgcattctaaacttagcaattgcttcttctagatctacaaagcgcatttcaccttgcagcattttctcaataccatggactatgattgctagctcaggtcccgcacttcttgaatcaactactataattttgctcaagggatgtttttcctcatacattgcttttgcctgaagggctgaagaaaaagtgccactcatcccgctggtcattgtgacgataatcgctttttctgttccttcaagtgcgtcaagccatgcttgaatacttggacaagttgttttgcctgccacattattttggttcatattggacaaaaattccttcatattcaaatcttgattatcaaggtagtcctcaccaccaaaagaaattgtcagaggcactacttccaaattacgcgccggatcattattcatattggcacttgagtcaacaattaatttaatattttccattttagattccttattttttgtatttattttaatacatatattatagtcctttgatatagagttttttaggctgctttactaatttttaaaatgtaaaccgctttcatatgtttacaccgtcacaaagttaggctaaaatttgagatgtaaagcggagcaaaaattgttccgtatggtatgaaaaacataccataatttttgaggaggtttattaatgctcaaatcagttattgaaaatgtacacgcacttgaaattttcgactcacgtggtaacccaactgttgaagttcacgttactctttcaaacggtgtcgtaggtaaggctgaagttccatcaggtgcttcaactggtgaaaacgaagctgttgaattacgtgacggtggttcacgtcttggtggtaagggtgtttcaaaggctgttaacaacgttaacactgaaattaacgatgctcttaagggtatggacccatacaaccaaccaaagattgacaagaccatgattgacttagacggtactccaaacaagggtcgtcttggtgccaacgctatcttaggtgtatctatggctgttgcagttgcagctgctaacgatgctcaccttccattgtacagataccttggcggtactgatcttgaaatgccacaaactttccacaacgttatcaacggtggtgaacacgctgacaacggtatcgacattcaagaattcatgatcactccagttgctaagacttcattccgtgacggtttcgaaaagatcgttaacgtataccacaccttgaagaaggttcttgaagacatgggttacgaaactggtttaggtgacgaaggtggtttcgctcctaacatgaagaactcagaagaagctttgaaggctcttcacgaatcaatcatcaaggctggttacaagccaggtgaagatatcgctattgcatgtgactgtgctgcttcatacttctacaacaaggatgatcacaagtaccaccttgaaggtaaggttcttactgatgaagaattagcagattactacgacaagcttttggacgaattcccagaattaatttctatggaagacccatacgacgaaaacgatgttgacggtatggttaagttcactaagagccacaaggaccgtatccaaatcgttcttgacgacttcatttgtactaaccctgcacttttgactaaggctatcaaggaaggtgctggtaacgcttcacttatcaagttgaaccaaatcggtactgttactgaaacccttgaaactatccgtctttcacgtaagaacggttacaacactatgatttctcaccgttcaggtgaaactggtgacaccttcatcgctgacttagctgttgctgttaacggtggtcaacttaagaccggtgctccagctcgttcagaacgtgttgaaaagtacaaccgcttacttgaaatcgaagaagaacttggcgaaggcgaacgtcttgcattcttcccagacgatgttgaccacgattaatttcgagttaaccgagtacaatttcaaaaaaagcatgagaattaattttctcatgcttttttgttgcgcttttacatatttattttatcaatttgctaaaagccttatttaaagtgcgatccttaactacttttaccataattggattttcgtttttagattgatcaagcaagataattggatttttatccttcaaacagaacaagtaagtattatgccacgatttaaaatcatcattagcaatggcaagcacattatagtcatattttgttttgccaattggactgtagccgatctcaattgtttttttatttagaataaatcgattagtagtcaatactttggggtaagttgcaccctttttagtctttaaactcttttttccatcatagaattgataagtttgccctgacttttcaccccagttattaactttcctttttagtttaacagttttagcggcatcccagattctagttgctttttctttatctttcctcttatctggcttagccttctgtttaggcttaacttgttttttgtctgaaaattgcttttttactggttttgttttctttttagcaaccccggatttaaaattgaagtgcaacactaagtgttaaacaaaaaggccatgaagacctaaacttgaagtgacgaaaaatcaagaaaggaagatcttcatgaccaattcaaattctagcatttctaagcactatcatcaattaaccagcgtacaacgtggacaaattcaagcaatgctggattccggcataacttcccgtactgttatcgctcaagaagttggctgccataagtcgacaatcagtcgcgaaatcaaacgcggaagcgtcctgcaaagagacagcagctatttattgtatgagcactattacgctgatactgcacagatttattatgagaagcgtcgcaaaaactgctatcagcgcaatccattgaagcattatgctgtctttttgagaatgctctccagacgctttaaagctaaatttgatgccaccagcatcgatgagttcgttggtgaattcaaaaggactatgccaggctacccttgtcccagcacaccaaccgtctatcgctatattgatcagggcttgctggacataagcaatattgatctgcctatgaagctcaaaagacgcaggaacaagcgtcatcacagccatggcggtcacgctttgcacaagaagcatcttggcaattccattgaacagcgtcctaaggaggttgaagacagaaaagctccgctgcactgggaaggagatctggttaaaggcgtcagacgcaagaatcagcctgctttaatgactttgactgaaagaaccacacgctttgaagtagttatcaagattcctgactatcgggcaagcacatgccaaaggctgcttcaaaaggagattgacagacatcctgcctggtttaaatcaatcacgtttgacaatggctctgagtttgcggatatgaccaagatcaagggctgccagatttactttgctcacccatattctccatgggaaaggggcaccaatgagaactgcaatggtcttttgcgtcaattcttccctaagggcaagagcatgaaagacaagtcaaaagcttatgttcaacaggcaactgatgccattaaccacaaatatcgccgaatcctccaatatcacacagcagaggaactcttcaagcaatatatctcttcataacctaactgttgcacttaatttgacaattcaggtctttttagcaactgttgttttcttagctttttttacttcaccaatagttactgcatctttaccgaaataaacttgactacaaccagttaaagtcgttgctaaggtaattgcagcgagtcctattaaaatttttctattcataattgctccatttattatttcttataatattattgcataaaatagtctcattaaactttaggcaaaaaaatagagctaattttccaattagctcgcggttttttaataaatggtgacttgataacgattggaacgatctgtttcttctggtttttcagcaatcttcccaactggcactataacactcgtttgaaaggcaggatcaatgcctaattctttttgcaattcaccggcatcatttaacctaactgcaccgcccatgacataaactgaacctaatcctaagtctgttgctgccagcataatattttctgctgcacaagatgcgtctcgttcaccaaacatgctatcttttttggtattaattacaaacaataccggtgcattgtagcaagcattatcagttttttctttgatcttattgcgtaatccttcatccttaaccacaactagattcatcacatctgtttgattcatcccacaaggtgcagtttgaaaagcgacaatcaagttcttaagatcatcatctgaaatactttctttactaaaatctctaactgctcttcgattagtaaaaattgaatttaccatatatgcctccgcatttactttacatacgcgtggtgctagttaaatcgttttagttaataaaaaagtccaattagactagactcaagttgtaagtaatttaaatagaaaagagtctgatctaattgaactatctcaagcttaatcgtttttctcaccatttacaagttagttttaatcggttaaatgtgatttgtcgctcgctgtataagctttatgcgcctgatggacttaaacatcgtaaaaatgttgatcagaccaagcttcctgatagttctatcttagcgatgctcatttggcaaactgaaattggaattgaatctcaacgaagattctgtaaattcttcgttggcttatctcattctcgttttaaccgtcgagctcgaatgctcttgcctctaattcgttgtatccgtcagggttggaatcaggaagtaaaggtaggtggagaattattgattatcgacagttttccgattccagtttgtcagcctgttcgcaattatcacgttaagatcttccgtggcatagccgatattggttataaagcgacgaaaaaaatctactattatggcttcaaagtccacgcaatagtgagtgatgatggctatctgcttgactacgcagttactaaggcgtcggtacatgatgcaaaagagacggtagaattgatgatcaatgctcatccaattaaccattatcttttaggagatgaaggctatttaggaaaagacttagcagccaagctaaagcgtatgggatacgtgctttggacaccatatcgtaaaaacatgaggggtgctaaaaagcataatgatcatcagttaatggcaattagaagaacaatcgaaagcgacttttctttgcttagctattacaatgctgagaataatcgagccaggagcttagtaggttttcaacaacggctagaaatagctattttagcttataatatggcatattgtctagaacgatttaactagcaccacgcgtatgttttttattttagcacaaaaagaggtcccaaattctagagacgcttatcgtaaaaataatcatctacccgatcatttcaactaaaagcttggtagaataaaagtatctatattaagaaaggcataaacaatgaaacaaatttattttaaccatgatggtaatatcgatgatttagtatcttatctgctcttactacaagcaccagatatcaaacttttaggtgttggtgcaattgatgcagacggctacattgatcctagtgttgaagcatgtcgcaaaatgaccgatctttttaacttacgtggtgatgatttgactattgctcgttccaactcacgtgcagtcaaccaatttcctcacgagtggcggatggcaacttattcatttaattatcttcccatgctcaatgaaagtggcaagattgatacgcagcaggcaaagcttcctgctcatttagacatggtcgaaaaaattaaagaagcagacgagcctatcgctttagttatgacaggtccgttaactgacctggctcgcgctttagatgtcgatcccgacattgagaaaaacattgaaaaactttattggatgggtggttctcttgatgggcacggcaacgttgctatggttaacgctgacggtagtcaagaatggaactcgttttgggatccatacgcagttaaacgcgtatttgaatcaaatattccaattcagatggtcggattagaaagtacggaagaattaccacttaacgatgagttgcgccagcactgggcaagtttacgcaaatatcctgcaatggacttgataggacaaggctatagtctaatcgtatctataccatcagccgaactctacctttgggatgtgctaactacaatcagcgcactatatccagaagttgttgaaaccgaaacggctaaagcaagagtcatcactgatgggttaagtgcaggaagctttgtacgggatcctaaaggaagagaagtaactcttgttactaaagccaataaggatctcttcttccaaaagatggatgaaattttagaaagaaaataacaaaaaaagaggctcacgcctcttttttatattgccttaattgactttttgtaaagaattaccgcaatccaaactgaaatgaatgatggcagtatcgcaactacaaacaaatttggatctaaaaaattacctactctgatgaagtttgtaattgaagtaatatgttttatgttactaaatatcgcttgataaactgtaacatatattaacgaccactgaatataatattctaccaaagtgagtgtagttgtcgaaaacttaaaaattttgctagccagtcgcatcccccaataaacaaaaacacctgaaagtacaacaaatgctgctaacagcaaaaacaagtttcccaaattaacatggtcccattgactcatgatcaaatacgcaattaccatgaaaattaagaaattaattgttgaacaacacagctgaatgacaaataaaattgcagcctttaagaattcaaacttgtgctctgatctgaataacaaaaatactactagaataattgcagcaacgatgaaatatgtattaacgtgcacagttatctcctactttgcctgttttaaggcttcgcttgtagcctctttaaccccattggaagtaaatgttgcaccagtaacagcgtcgatatcagcagattgtttatccaaaatttcctgctttaatgttttttctgctttttgaccatactgcggcgtttccgtagataaatctaaatctacagttgaaattttattatcagctacagttaatgtcacacctacaaagcctgccatgccgcgtgcacgggcactatatgttccttcttttaacatcctttttcctcttttttataaaacaaaacattctaagctaaatagtgaattagttatccgacgggataattgattcactatttttattcttttgtagaattaaagtagtagtaaaacgatatgccctgaggtctttagacacttgatgtcgtataataaactggcagttttacttaagttttcaatagtctcttcgaagaatgtggacactagatgtcgagtttagaaaattagatctgatttcttaagtaaatacgttttactactaagttttggaggtttttattatgcaagttacttttggaattgatgtaagcaagtctacttctactgtttgtgaactaattggtgaaagcaaaaatgaactaaccattactaataatcgtcctggttttattcaattgcttcatgaattaaccgctttttctaaacatccgcaaattatttttgaagctaccggtgtttattcacgtacactgcaatcttttctggaagactatggctatgattatgtaattcttaatcctcttaaagctaaaaaagaaatggatatgggactacgtcataataagactgataaaactgatgcttatcatttagccttaattcaaagactatatcatcatccaattaatcaacttcaatctcaaacttataagcagcttaatgctttgagccgcttctatgaccagttaacagctgacttagtaatggctaaaaatcgacttcaccaagctctacaatcgacttttcctgaaattgaaaatctattttcttctgctaaaggtaaaaattactggcaaatagttgtgcgatatcctcattgtgacttagtaagaagagaagataaaaaacagcttattaactggttaatgagcttaaaggggattgcttttaaacacgctctaaggactgcagataaattaattgaattagcttatcaagcttatccagttgtatcttgctctagcatagaagtcgagcaagtgcagtattatgcacacagattgcttaatttaagtgatcaaagagaaaatttaatcgcaagaatggttaagttagcgaagtctttgcctaatcatgatttagaaaacctagaaagcattccaggctttgcacagaccactgctgtcagagttttagcagagttaggagatttacgcagatttagtaatcctaataaaatcaatgcttttatcggaattgatccaggcagatatcagtcaggagaaatggactctaatttaagtattactaaacatggcaatgcagtcgcacgtaagttgctttatcgagctattggacaaattgataatgcagctaagacaaatccgtgtcatatagcagattattatgaaagcaaaaagctatcctctcaaaccaaagggttcaaaaagatagctattgcttcaattcataaactaatcagaaccatttatgctctgattatcaatgatcaactatatgattacaacgtagccacacataaccaaaaagactttagttgtaattaattgatcaagtacattataacgctaagcccataaattaaatatagaggtgggcttatttagtatgctttctaaaaaaataaatcgccactaaaagatactcatgacaaaatttaggtaaaaaataaagccaaacaccttattgcgcttgactttacgtagaaaaatactgctatataataaatataacagtattcctaaaaaaagccacaaagatattgtgtttagtatatcatattgatatactatctcttgggtcttgattgtttttataagcccttattatgacccaagtgcaggtagtagaatccccttctacctgttttattataccacaataaataactgatgttatataaaatcttaagttcttttgaaaattttctcaaaagggcttttttcttgcactatcctttctaagttacgttaaaattgaaatggaattataaagttatatttaaagaaggtaaagcatgtatccagataataatattcttacatatttaaaatggcgtggtgacgttgacttctcaacatcgccttttaatgatattgatgcacttgttttatctattttttcttatcttgaattaccaggtattgttaaaagtaacggaacgacaattagtttagagaaggctgccaagctctattttgcagatgatcatcctcgttatgataatttgcaataccaagaactatttaaattaatggctcatgcagaccgctttaaaaatgcaaaactgtcgtattttattagtaccttaactgaacatactcaatttagtgcaatcaaaattgaactaactgatgggaccaactttattgcttttcgtgggactgacgattcactaattggctggaaagaagattttgaaattagttttaaaatcactgtagcccaacaacaagcagtaaaattgctcgaaactattctcaaagctgatgatcaagattattacttaggcggtcactcaaaaggtggcaatttagctgaatatgctgccattaatattgagcccaaattaagaaaaagaatcaaacgtatttatacctttgattcacctggaattgcagaagaagttggtgctcagctccctaataagtatttgcaaaatactctacgccgctttgtgccagactttagcgtcatcggtcgcttgtttgagtcgaaaaatattccagccactattgttggtagtactcgcaagggactaagccaacacgatgctttttcctggcaaataatcggttctaacttcgacaccagacgccaccgcaatgctcaatctcaagtatataatcaactaatcaatcaatggattggtaacgccaccctagaagaacgtgagtctttaactaatgacctcttctctgctttaagctctagcggcgcaactaagatcaacgaacttgataaaaatggttttggcggttttggtgcaattttgttttcactggctgattcatctcggcgaacccgtttcgtctttggttcattattttccagcatttggcagacgatcaagagccagcaactgaccaaagcgcttttctcaacagacacaattgttggttgggtgctggtagtattcggaatcattagtctaactctaccccaatatgcagtgcgagcttttggcgccctagttgccttcacggggattggtttcagtgttcaccaaattttaacaacggcaaaatctagtctaaaagaccgacaaaaaaacttctttattatttcgtatttagtagtttttgctttatcaaccgcgttaatttctaataaccgtctactaattttcttagctcactacttcttaggactattcttaattatctattcctacattcgaattaggcaactagtctttcgtaaattacccggaatttttcagattactattgtagcgatcgaggcattaattgcttttgctttaggaattatcgtagtggttaaccctagtgcctttaatcggagagcaattattattatcggtattttgctaattgcttacggcttcttcaagttagttggcgaattatttggccagcgcagcaaaatgcccaaaaatcatcgttaaaaaaagcttgttaacttcaatatcagttaacaagcttttttcttagcccttaataaaggtattagcctttatatgctttaaaatgttatacccgattgcacgaatatgatttttactaccataagtttgattcaaaaacattacaattccattctgattatcagtagtcagttgcatccagttaacaaagtgggtatcaccaaaattgccataagcgacttttaaagtttgattctttttcagataaaaaccacctgagtaagtattaaccttagaacttaaatgaccaagataatggaactgttttttagtcagaatcttgccattttgcataccagattggattttataataatcattagccgttgaaaatagattcccagcaccaggcaattgagaaacaacattacgattagcataggtactagcattgtaatttttaccaccagaataaagatatgaaatcgcatcagtctttgaccgcggaatttgttgataaatataggtttgcttcaacttcaatgatcgaataacccgctgtttcacattagcagcataagactttcccgttactttactgataatgcctgccagcaaaacatagttagcattattgtaattaaatttactgcgtcccgtattttctcgtgcattggcttgggcaattgtccaattgatcgcgccattttcagaaaaattaactccatgattagattctgttccaattacgttaattcctgaggtatgtgtcattaactgccccaccgtaatttggtttgcatgcttcaaatttggataccagcgtgaaatcttagtattctgattgaatttcttctggtagattaactgtgtaattattgcagcagtaaccatcttttgcaaagaaccaactggataaagcaattttgtattgccatttttcagtcgtttgctgtaataaccgtagcctaagctaacacgttgagcatgcccattttttacaatttcaatgcttcctcgtaaatgatgctttttcatcatcttaagcgtatattgccgtagttgcttatttgaataactcttcgcctgcacagcatgatttgacattatcaaacacgatgaacaaaataaaatgaaagctatcccgaacttttttagtgtcttcaaaatttcaatctccttttaatcctgaactattctaccacaatcaaaaagcgcaaaatcacttttaatcatggtttgcgctttcatttttatttttttaaatttttatagtaagttcatcttaactaggtattccgcattttcaaccgtattccatgcagcacccttaagcaaattatcggctacaatccacatgttgaaggcacccttattttcataatcagggcgaatgcggccaacaaaagtttctcgcttacctgttgcattaattggttgcggataaatttgatgtttaatatcatcttccaaaacattacctggaaaggcagcaactgcatctttaatatcttgtgccgttgcagtctcatcttcaacagtaaagtagacactttccccatgagaaattgacacaggaaccctaacacaagttgcagttaccttgatatctttggcattcatgtcatttagcatgatcttctttgtttcatgaatcatcttccattcttcatgagaatagccactatcttctaaaacatcaatttgaggtaacaaattaaaggctaatgggtaatgctttttgtctcctttagtaggtaaaatatgagcatctgcttgcatgtctttaccatcaaggtaatcttgactttccttttttaattcatcaattgctgcttgccctgctcctgaagcagcttgataagtggaaacgataatttgtttcaaaccaaattttcttcgaactggttccaaagccattaccatttgaattgttgaacaatttggattggcaatgatgccgtgatgctttttcaatgcttctggattaacttcaggtacaaccagtggtacatctggttccattctaaatgctgatgtattatcaacacagacagcaccacgcttaacggcttccggcagaaacttctttgacactgcaccaccagctgaggaaagtactaaatctacaccatcaaatgatcctggtgtagtttcttcaactgtcaaatcttgatccttaaattttaaaactgtacctgctgaacgtgaggatgcgagtagctttaagcttttaactggaatcgttgattgttccaattgttcgatcattcttcttcccacggcaccagtagcacctagaattgcaacattatattctttcaccattatttttttcctcgcaaaaaattcttcattctttccatcgcttcatgtagattttcatcactggaagcatatgacattctaacgtacccttctccaccaggaccaaaagcactacctggagtaataccgacttttgcttcaaatgctaaatccagtgcaaattgcatatcatttttaccatatttagctggaatcttagcgaaaatataaaatgctccctgtggtttaactgcttgcatccccatcttagctaattcatccaacacaaaatcgcgccttctttgatatattttgcggtatttttctggatcatccaatccatgctccaaagcttcagtcgctgcagcttgagaagagtcagttgtagtcgtaaccattaaaccatggactttaccaatttgttccataatttttgccggaccagctacataacccagtcggtatcctgtcattgcatgtgacttagataatccagaaatataaattgcccgttcaggaatcacacttgcaattgaaaaatgcttaacgccataagttaaagtactgtaaatttcatcagtaattacgtacagattgtgtgcttttatcacttcagctaatgccctaatttcgctttcggtgtattcaactcctgtcggattaactgggtagtttaagataaccgccttgatattagattcttccttaagtgtactttctaatctttctggcgttaatttaaagttatcttctgacgtgttcattaatacataatctgcatctgctaaagttgcaactggccaatatagtgaaaataccggtgtaggaatagcaaccttatcaccccgattggtaattgaaaatagtgtcgcattaattgcttcagttgcgccaactgtaaccacaatttcagtttctggatcgtaaactactccacttgcttttttcaaataattgctaattgcttgcctaagttccaattttcccttttgtggcgcatagtgtgaatcattatttcgaatactttcaattgcagctgttttaacatgctcaggtgtattcatatcaggctcacccaaagtcagcttgataattccaggaatggttgaaactttattatcaaaaatcctaatccccgaagccttaacagattgaatcttcttacttaaagctaagtcatttgctaattctggcataatttttcctcttataaaatattctctaagccaataactagttcagttaattgatctactttttctaaagcaactttaaccccactcataaaggaatcacgatcaaatgaatcctgtctaatggttaaagcttcgccaggtccaccaaataaaacttgctcatgtgcaatatagccaggtaagcgtactgaatggattttaattccttgataatctccaccgcgaacattggctaaagtctcagtttcatcaggcgcagtttgatgttcaggacgattttgcgcgatcatttttgcagtagctaaagcagtgcctgaaggtgcatcttttttatctgcatgatgcatttcaataatttcaacatcagggaaatacttagcagcttcttcagcaaacttcattaataaaactgccgacattccaaaattaggtgcgattaagccacctaatttttcctttttggctagttcaatcaaagttgcttcttgatcatcactcaagccagtagttcccacaataggtttaatttgatgcgttaaagcaaaataaacattgtcatagacagctgcgggagtagtaaaatcaatccaaatatctgcagcatggtcaggaatttgacttaattggttaaaaatttgggctgttttaggtaaatgatatctttcaggctcatttactgcctttggagcaaatccagccaccaattcaaaattgggcagctgattaactaaactaacagccttttgccccattgcgccagtaaacccagctattagtacttttttaggcatctcgtcttaccaatcctttcctaaattaagtggcaacttttgcatcaatgcattagcatttaaacctaaatgctgggccaacttttctttttcctcatcacctaaagcgactaatggcaaacgacatccccctactataaatccttgagcattcaaggctgccttaacaggagctggtgaaggatacataaacaaagcctgcattttcggcgttaaccagcgttgaatcgtgcccgcttcaggataatttccttcataaagatcatcaaacattcgccgcatttgtttgcaatataaatggctagctacggaaataacgccattggctcctagtaatcttgcaggtaacgcttgcgtatcttcaccactaaataccaaaaaattaggatctttatgatcaataatgtattccatttcttctaaagatgcacattgtttgattcccttaatatttttaaggcgtgataattggactaccgtttctttttccatttttacgccagttctaccgggaatgttataaatcataattggcattttagtctgagcattaacagcactaaaatgtgcaatcatgctacgctgatcaggcttattgtacggtggcactactactaaggcataatcaattcctttaatctgtgctacctcattggtgaaggcgatagtggttgcagtgtcgttactgcccgttcctgcaataaccggaacacgtccattaacaatttgaccaaaatgctggtacaagtctatcttttcatcatgagtcagagttggcgtttctccggtcgtaccaccaactacaaagccattgcaaccttggtcaattaaataattaaccagcttttctaaactggcaaaatctattttttgattctcatcaaatggcgtaacaatcgccgttaacaaatctgcatcaattaatgttgccattttattgcctcattctattaatcaaaaatcctttgattgcatcaacgccgcgctgaatgcttttctcatcaggattaagtgtagccgtatgcaattgtgaatcaggattaccaacacctagccaaaacattgttccagggaatttagtcagcaaaaagccaaaatcttcacccgtcatttttggttcagtagtaataaagttaaccgtcggctggcttttcatatatgaaataaagttcttggttaattgtgggttattttctactggccaatatccaccttgattcaagtctaacttcacttctacaccaaagcttttctcaataccaagacagatttctttgagacgttgatcgattgtcaaaatcatattttgagttaagccacgaatcgtgccctcaattctagcttgaccagcaattacatttctaatcgtaccagcttcgattttgcctagagtaataacaccactttgaattggatctatgcttcgtgaaataatagtttgaacctgcatgatcaaacttgctgctgcaactaccgtatcatttgcatcttgcggaaaagctgcgtgtccacttttacctagaatatcaatattgacttcagttgtaccagcaaaaagtgtacccatccgacacccaatgctaccagcaggcaaagcggggttatcatgcaagccatagaactcgtcaggtttaaattgatcatgaaaaattcttttttcataagcttgcatcccaccactttggctttcctcggctggctgaaagaaaaaaagcaaattatcttgtggctgattttcactaaaatagcttaacaaacctaatgccacggtcatatgaatatcatgtccacatgcatgcattactccctcatgttttgatgaaaatgccagtccagttttttcagtaactggtaaagcatcgatatcagcacgatatcctatcgttctgtgtggttttcttcctttaactaatactagaattgcggtaggcagtgtcgacggtatctcaacttccaaataatcttgcttaaatttttgaattacctcgattaaataatcatgtgtttctttttctgctagtgctaattcaggtatttgatgtaaatgccttctaatttgaattaactcactttcacttaaaactgacattttataactttctcagattatcttctagttccgtcttactactagttttttcatcaacttttttaataattttagcaggaacgcccgctaccatcgtatgtgctggcacatcatgagtaactactgctccggctgcaataacggctccttcacctacatgaacaccctcaatcacaacagcattagccccaatcatgacattatcatcaatttgaaccggtttagctgaagcaggctcaattacaccagccaatacgctaccagctccaatatgacaatgttgtccaacaatggcacggccaccgagaactacgcccatatcaatcatggtattagccccgatttctgctccaatattaataatggcacccatcataattactgcattattaccgattaccacttgatcacgaataatagctcctggttcaattcgagcattaacttttttgaagtccaataaaggaactgctgaatttcgtgcatcattttcaatatggtaggccgtaatttgatgattttcttttaaaaatggttcaatatctttccagtcaccaaagatcgcgccagaatgagcttcagtaaaattctcaatttcctttggaaaatcaatttgtgctaaatctcctttaataaagacttttaccggtgtcttttttggtgcattaccaatgtaatcaataatactttttgcatctaactttgccatcttttttctcttttctaatttaaatatgattgatctaaatgaaccaagtcttctaaactttcacgcttaatgactaattttgctttaccattttctgcaaataccactgctggtcgaggattacgattataatttgaagccattgaatacccatatgcacctgtatccaacatcgctaacaagtctccagctttgacttgtggcaaagcttgatcttctgctaatatatcgccactctcgcaatacttaccagcaatacgaacatgttcagtcaaaggcgcttgtggatcggtggctaaaactgtttcatacttagcctgataaagtgcagggcgaatattatctcccatcccgccatcgacagtaatataagaacgataacctggaatatccttacggctacccaccgtataaaggttgtaaccggctggaccaacaattgatcttcccggttcaatatcgatttcaggtaaaggataattcattttttcagcttcagttttgatcaccttaacaatcgtcttaacaaattcttctggtcgtaatggatgatcttcttgggtatatttaatcccaaaaccgccaccaacattaataacttgtgcaagatagccatacttttctcgccaatcttgcgctactaccattaatttttgtgctcccatttcaaagccgtttaaggcaaaaatctgtgagccaatgtgagcatgaatccccaacattttcatcctaggattagctagaacttgttttaatgccttttctgcttgacctgattcaagatcaaagccaaatttactatcaatctgacctgtttgatcatattcatgggtatgtgctgaaatccctggtgcaatacgcaacatgacactaatcgtagcatcgtacttttttaaaacttgcgccaataactgaatctcatgaaaattatcaataataattttgccaacatgattttttacagccatttccaattcagttaatgatttattattaccatgaaagctaactctctccattggaaaattggcttttattgcagtaaataactcacctgctgaaactacgtcagtgtatgctccctcttctgcaataacttgatacattgcgattgctgcgaaagctttacttgcataactaacagcataggccatgttttcttcttcaaaaactttcttaaaagcccgaatttgtcgacgaatttgatcgacatcataaactactaatggcgtaccatacttttgagctaattctactatatcaactccaccaatcgttaaatggccttgctcattaatctgatctactgcaatttgtgaattcattttgttctcctgtctttttcaggcgaaacgctaataaaaaatccattgtctgcgccaaacaaacaatggattaatttctacttaatctatggtcgatagcgctccgcgaattttgttcgcgacagtccgcagtttattcaactacgccccagctcaagcctttagcatgactcagcttcggcaacctccccttttacaattcatcttcgttttgcccaactcagaattgttacttatgtcggctgcgcctcttcgattgactgtagtttacaattttataaaaacatagtcaacaaatttattataaaaatttaattttatttgtaacaatgcggcatttagagtgataaattacagtcatcacttgcaagattaaaaaataatgttagaattcaattaaatttagtctgacttttttatttaaattaatgatttctgaaaacaaaaggagttttgaaatgaaaatcgtaaagtttggtggctcttctttagctaccggtgaaagtgttgcacaagcaattcaaattattctcagcgatcctcaacgacaagtaatggttgtctctgccccaggcaaaaggaatacaacagatatcaaagttactgatctgttaatcaagtacgcagatttagccttaaagcacaagaattgtgttgaaatcgtgaataaaatttttagtcgctatcaagaaattggtcattattttggcttagctgatacggaattaagtattattaaacaaattttattagagttgcccaatcagggttatcctaacgaaaaatatcttttagctgcatttaaggcacatggtgaacggcttaatgctcgtttaattactttaattttacgccatcaaggaattaatagtcgttttcttgatccggctgaagccggtttaatcgtgactggcgagcccaatgatgccattgtcaatccagagagctacttaaatcttgaccaaattaaaattaaggctgatgaacgtatcgtatttcctggcttttttggcatgactccgtctggtaatatcgccactttttcccgtggcgggtcagacattaccggggctattctagctcgcggctttcatgctgatctctatgaaaattttacagatgtcaatgggatttttgccgctaatcctcatattattgagcatccccaatccatcaagaaaatgacttatcgcgaaatgcgagagttgtcatatgctggcttttctgtttttcacgatgaagcattgattcctgctattcaaggacagattcctatcaatgtgaaaaatactcatgatcctagcaatcctggcactatgattgtcccagaaaaggattttgtcccagataatgcaataaccggcgtaaccagccaaaaacatttttccgcattatatttgcataaatatttgctcaataaagaagctggtttcaccttacgtatattacaaattttataccaacataatattccatatgagcatatgccatctgggattgacgatattaccattatttttaacaatgattttctaaacgatcagttaattgatcaaatttgtaatgaaattcaagctacaattaatccagatcaactcgaatggattgaagattatgcaattattatggttgtcggcgaaggaatgcgacaaaaacataccatcagccgtcaaattatcgattctttaggcgatcatgatatttcaccacaaatgatcaatcagggagcttctcaaatttcaatcatgatcggtactaaaaaagaaaaggctgatgaagcagtaaaaattatttatcaaaagttttttaattagggggcattatgattaatttattcaaagttcacggttcgcaaaatcatttctttattcttgatcaaacacaattcgaacacgaattaagtgacgccgagctaaaaaattttacgcaaaagattaccaatccacaaactggactgcttcacggagcagatggcgttttagtagttaatcatcccgtgcattctaactcacttggccagatgcgtgtaatcaatgctgatggaagtgaagcatcaatgtgtggcaacggtctacgcaccgttgctcgttacctaagtgaaaaaacgggaaaagataatttcctagttgacacaatgaatgccagcttacgtgttagaagagaaaaagattttgcttctaacgtgccagcatttgcagttgagatctctcctgtacgctttaataaagaggcactcccttttgataatttaggacaagaacggattattgatgcttggttgccagaaatttatcctggattacgttttacttcaattgccgtacctaacccacatttaatttcttttgttaatcaagcagaaattaccggcccgatcttaggcattgttggtaaaaaattaaatagcaataatccctactttacagatggcgtcaatgttaatttcgcgcaaattttagataaaaataaactttttgtccgcacttacgaacggggcgttggttttaccaatgcctgtggtactggaatgtccgcgacttctcttgctcttactttaacccaccccgaaataggcaacttaaatacaccaatatcagtttataatcctggcggtatggttaaaactatcgtgcattatgaaaaaaatagttattggatcgagcttattggtaacgctacttttactcatcgaattaagctttctgaagctgacttaaggaaaggtgatttttccaatgtccagatccaaaagactgctgaacaaagtgcttatgaaaaatttattgctaatctgccaaagttcaatgacattacaactttagcgtaaaaaaatggcttgcaacacgcaagccatttttactttttaattattaatctaagtctttcaagccatgctttttcttggaaacgcgataagctactaaaccaaagaaaattggaccaaagcttgtccaaaaagcagttgcatatctatgctccaaaactggttgcaaaaccgtaaatataattccggtgcaaacaatcagctcaacaaagactactaacgcaaccgtccatttatagttagtaaacactctaaacttgcgcggataatcttttttaagaaagaatggaaatgcaccgatcaagaaaatataaggtgcagtagcggctacgttacccatatccgtcagaatttgataaaagctagtcgctgcgctaccaccgaatgagaccaccgcaattaataggcaaacgaagacagtttgagcccacatcgcattagcaggaataccgtgtttatttaatttagtcgctgccttaggccataaacgtggatcagatcccatgatgaaggatttaattggtgaataaagcaaaacaaagagagcacctgtcattcccatcaaaccagataaagcaattgctctagtaaagaatttaccaatcaataaactcgtgttaggatccaaatgaagtgcggttccaaaggctttgccaagtgtgccatatacggtatacgtaatatttccagtattggcattggctgctaaaatatctttttgataattaactgaaaagccggtcataaaaatcatcaaaacataagaaataatagtgaacaatgacccaataattaagcctttagggaaatctttttctgggtgtttcatactgtcaatcacaccaccgacggtttccatcccaccatatgcaaagactgcataaactacgaaagaaataatcgtaattggcgtttgaaaacttttattaggcgaaataataaaactttgccacccagtaatcggctgagccaattgcccatgattcataatcaagaccgttaaactagctagaataaagactgcattcattacaatcatgaaccaaccaccgattgatgacataattttaattccagttatccctctggaagacaggtacgttgatacaatcatgaataaaattgctagtacacctatcaattgagtaccatgcaagcccaaaatattccattcttgagttgtatctttgccaaaaataagggcagagattgaaatccaaagccttgaggcgcttgcaaccagccacagcacccagttagccagccatacaaaagtcccaataaaggcctatttttgtccaactgagccagctaaccatgaataaataccaccttgagcatcatgaaaagcagacccatattctgccatcattaagccagctgggaaaaagaaacagacgccagccaaaataaaccaaatgatcccagcatatgtcatttgctcataagaaacagaaacattgccaaaaccataaaccgttgtgataatcatcaacacaaggctcatagtcgtcaatgattttttagtttgtgaattttcatcatccaagataaagcctctactttctatttacactttccattttagcatcgtttatcttgaataaatttattctaattttaggctcataagaaaaaactactagttattcactagtagcccttcatttttattcattaattcttttttcaatccaattacttaattcagttacatgtaatttagtgaccgaactaaaagtcaaaacggtgacatgatcatagttgagattcaactttttctttaagcctgacatcaccttattagtttgactcttttttattttatccatcttggtacaaactaccaaaattgggatatttagatattgagcataatcatacatagcaatatcatctttggttggttcatgacgactatctactaagataattagtccctttaggttgggtctagtttctaaataatcttgaatcatttcgccaaattcttgccgcttcttctgtgaaactttggcatagccataacctggtacatcaaccaaataaaatttttcattgactttgtagaaattcaaagtttgtgtctttccaggctgtgacgaggtcctagctaagtttttacgctttaatagggtatttatcaagctggactttcccacgtttgagcggcctgctaatgcgatctcaggcaagttatctttaggatattgatcttctctaacagcactaactgcataactactgctttcaatgatcattgacacttacctgttctttattatcagtatttttgcggattacctttggcttagcgtgcttagtaattacgtccttagttacttcaacggtctcaatatcctcttcactaggagtttcatacataatatccataattgaattttcgataattgttctaagtccacgtgcacccatatttctttggattgctaagtcagcaattgccttcagagcaccatcagtaaacttcaaattaacatcatcaagtgataacaacttcttatactgcttaactaaagcattctttggttcagttagcactctgaccaaatccttactactcaatttatcaagcgtagtaataattggaattctaccaatgaattcaggaatcattccaaatttaactaagtcagctgtagtcaaatggcgtgtccaatcatctgcattaattttatctgcctcattttcagcaccaaagccaatggtctttttacctaaacgatttttaacgatttgttcaattccgtcgaatgccccaccaacaataaatagaatgttagtcgtgtccatcttaatcatttcttgttgagggtgtttacgcccaccttgaggtggaacagaggcaattgtaccttccaagatctttaataatgattgctgtacaccttcacctgaaacatcacgcgtaattgagacattctcagattttttagaaattttatcaatttcatcaatataaataatgccacgctgtgcacgttccaaatcataatcagcattttgtagtaacttaagcaaaatattttcaacgtcttcaccaacataccctgcttcagtcaaggtagttgcatcggcaattgcaaatgggacatttaaaatacgagccaaagtctgagcaagatatgtcttacctgatccagttggtccgatcattgcaatatttgatttttgtaattcagttgaagaatcaacatccatttggctaattctcttatagtgattatatacagcaactgataagacttttttagcacggtcttgaccaataacatattgatcaagttccttttttatttcaacaggcttaggtaattcacgagctgctttaagtgaatctgctcgtaattcatcgtcaataatttttttagccaagtcaacacattcattacaaatatatacaccgttaccggcaatcattttcttaacttggtcttgagttttgccacaaaaagcgcatttaatctcttcttgatctgtaaactgatttgccattatttttcctcctatatctaccaaaaatcagattatcataaattaactaatattgataaatattaagctcgaacagcaaaaaaagcggcctatagccgctctttttgagaaattagcaaatattactattacttgctttccttcttgtcatcgtcttctttgttttcaagctttgacttagcaacttgcttagcattatcagtaataagatccatagccttacgtacagtaatgtcgtggcctaacatgtcatctgataaggtgttacgtaccatcttttcatccatgttgtattctgaagcaagatccttgatttctttatcaatttcttccttagttgccttaaggtcttcagcagcaacaatagcttcaagaactaagttagttttaactctttcagctgcattcttttcaaattgtgaacgcaattgttgttcgttggtattagtcaacttgtagtaagtttgtgggtcaataccttgacgttgcatattacccaagtattggttcaattgagtatcaacatcttcttgaatcatagcatcaggaatttcatcgatagtagcgttgcttacagcaccttcaattgcagcttcttgaatagcgtcgtttgcttgttgttccttttgttccttcaagtccttcttgatcttttcctttaagtcatcaagggtgtctacagagtcatcaacgtccttagcaaattcatcgtctaacttaggaagttgctttgacttaacttcgtgaatcttagttgcaaagtgtgcttctttaccagctaaatcctttgcaccgtaatcttcagggaaagttacaactacatcaacatcatcgccggcttcatggccttcaagttgatcttcaaagccaggaataaatgcacctgaacctaattcaagtgagtagttttcagctgagccgccttcgaatggcttgtcgtcgatagtacccttgtaatcgatagtaacagtatcgcccttttcagccttacccttcttaagaacaagttctgcattttgttcacggcgcttgtcaagttcagcatcaatgtccttttggtaaacacgagtgttttgcttaagaacttcgatacccttgtagtcacctaacttaacttctggttctacagtaacagtagccttcatagtccaatccttgtccttatccattgatacaggaacaatttgtggttggccaactgctttaatacctgcttctttaacagcagcagaatatgcatttggtaatacaatatttaaggcatcttcatataatgcttcttcaccgtaatattgatcaaagatcacacgtgatacgtgaccctttctaaagccaggaacacgcaagtttttctttactcttctaaaagcttggtctaaacctaatttaatttcatcttgtgaaatatcaaaagtaagatcaccggttgtcttaccggtcttttcccatttaacagacattaattaaatacctccaatgtcaaatttgagtttgcatcttgcatactaagttatcttaccttaaaaggccgcaaaaaacaaatttaaaagaaaaaagatgcgctcctgtgaagaagtgcatctttttttaactatatcgttagaaattagtcaaggatttcagtaacctgaccggcaccaacggtacgaccaccttcacggatggtgaacttagtacccttttcgatggcagctggcttgattaacttaacagtaaattcagtgttatcaccaggcataaccatttcagtaccttctggcaattcaatttcaccagtaatatcagtggtgtggaagtagaattgtggacggtagtctgagaagaatggggtgtgacggccgccttcttccttcttcaagatataaacttgacccttgaattccttgtgggtttgaattgagcctggagcagccaatacttgaccacgaacaacttggtcacggtcaataccacgaagcaatacaccaacgttatcgccggcttcacctaagtcaagagtcttgtggaacatttccaaaccagtaacaactgacttaagaaccttgtctaccaaaccaacgatttcaacttcgtcaccgaccttaacagtaccacggtcaatacgacctgaagcaacagtaccacgaccagtgatagtaaatacgtcttcaactggcattaagaatggcttgtcagtttgacgttctggagttgggatgtattcgtcaacgatgtccatcaacttaagaatttgttcttgagcttccttgtcgccttgtaaagccttcaaagctgaaccacgaacaactggaatatcgtcaccagggtaatcgtattcagtcaacaagtcacgaacttccatttcaactaagtcgatcaattctgggtcgtcaactaaatcacacttgtttaagaaaacaacgatgtagttaacaccaacttgacgagcaagcaaaatgtgttcacgagtttgtggcataggaccatcagttgcagcaacaactaagatagcaccatccatttgtgcagcaccggtaatcatgttcttgatgtagtcggcgtggcctggagcgtccatgtgagcgtagtgacgattttcagtttcgtattctacgtgggcggtattaatagtaataccacgttccttttcttctggtgcagcatcgatttgtgagtaatcttcagccttagccaaacccttgtcagccaaaacagtagtaatagccgcagttaaagtggtcttaccgtggtcaacgtgaccgatagtaccaatgtttacgtgtggcttagttctaacgtaatgttctttttctgccattaaaatgaccctcctgtaaatttgcaagaagtccgttgagataagttaacggataattctctgttgaatattgtactactttcttcggcaaatgcctagtaaaaaagcttaagcgaaattgcctaacgaaaatatcctttgctaattatactaaatagtttgaaaatgtaaaccttttttacttattttttattgcggtaagtatttatatattttttctagtaatttttgatgactacggccatcttttctttgtaaaaatgagactaaatcactagcaaaactgtcaggctcatcaatatattggttaattttagggtaaagactgcctaataccaaattcacttctcccagcattaatggcaactgacttggactattgtgaaatttgcttccaatgctagaaataatttcacggtacttaggttctttttctagaagcagtgtattcgccggaataaagctctccatctggcctattacccaaatttcaaacttttcttcaagtcccaagcgaactaagtcttcacaaagtgacaacctaacagcaaaatctggcgttggatctaataagacgcttcgtgcaaaagctttaaaattaggcaggtttaacttatgtaaactttcataatccgactgagtaacctgttctcgttgtttaaagttttgcataatctgccgctgtttttcttcagaagctggttttaccttttctgataagtccaccccaacaagattttttagttgtagagcttcaataaaaaaattatttttagctagaatttgacagtaacttttaaatactcgctgatcagaaaaaagatcaggctcctctttaattaaagcatatgcctgatcttcttgtttattagcgcaatagagtttgcagagtttcaaaataacgtccaatgaatgctcttcacgtaatgcttcttctagattttgaatagctgcttcgagatctcccttacgctcatcttcttcagcaagtttcaataaattttgttggcttactgatgtcatttttagtctttcttattactttcttttttcttatttatttttttattttcgtctttggcatggttcttattgtcattttgtgctttttcattgcgtttctgcatagcacgatgacggttttgatttacttccatgaccacgggcaagatcactggacgacggttagttttcttgtataaaaacttctccaaatcaccgcggatatcttgcttcaattcagtccaatcaaactttttgtgttcaaaattggcctgaattgcttttttaattacatcaattgaatcactcatcaactggcgattagccttgatatagacgaaaccacgactagtgacttttggctctgcaataatctttttcttcttacggtcaattgtaacaaccgcaataaagattccgtcatctgataggacctcacgatcacgtagcacaatattaccaacatcaccaacaccagaaccgtcgatcatggtatcttcacctggtactgggtcagttaagaagaaacgcttctgcttaaagtcatattcaagacagtcaccattcttggtaatataaatatctttaggattcattccagctttaatagccaaatcacgtactacttcaagtaaacgatattcaccaattactggaattaagaattttggcttcaaggttgtaatcaaaagttgcagatcacgaccagttgcatgcccactagtatgtatatttctgcctaactggataaccgtaccgccagccttatataccaaatcactggtttcagctaccatcgtttcaaccgcatgtgacggagtagttgcaataaagaccaaatcgcccttatgaatcgtaatcatactatgacgcttcttagccattttttgtaatgagttaagtggttcacccatacgcccagtctctaatataactgtctgctcatctggcacagtcttcagatccttaactcgcatcaacaagccttcaggcacatctaaatagcctaatttcattgaagttctaacaatcttagctagatcgcggccagttaataagacgcgtttccctgttgctgctgcagcatttaaaacttcttgaacacgattcaagttagaggctttagcagctacgataattctgcctttagcatttctgaagacattagtcacaaatttaccaatatcttgttcagatgcattagggaaagatgcttctgcattagatgaatcacttaaaagcgctaaaacgcccttttgttcaatttcagctaagcgatccatatcagtccgataatttaacgcagctgttggatcaaatttaaagtcaccagtataaacaatttcacctgctggtgtatgtacatctattccaagtgaatcaggaattgagtgtgtcgtatggaagaatgaaatacttgcattcttaaaatcaatttcagtatctgcatcgattacgtggaacaaactattcttacggcgtttgttttcgcgttgtacttcaattttagcaagttcgatactcaattgtgaaccaaatactggaatatcgtatttacgcaaaatgtatggcaatgcaccaattgaatcagcatgcccatgtgttaaaaagatacctgctactcgatctccgtattgttcaaagaaatcaaggtcaggaattactacatcgataccaaataaagaactatcagggtactttaatccggcatcaagaacaaaaatttcatcattaacttgaacggcaaacatgtctttaccttgttcacgcacaccgctcaagatcataattttgatttgatcagccattatatttccttttctatctaatttttaattcttatggatctatcgatctcaacgtaaaaataatctgtttcaattttagcataaagaataaaattatgacagagacaaaaaaagccagccttttcggctagcttcattattcaatattatgtgaaaattaacgacgaagacctaacttcttgatcaattcacggtaacggttaatgtcgttgttttcaaggtaacgaagcaagttacgacggtgaccgatcttcttaagcaaaccaacgtatgagtggtggtcatgcttgtgactcttcatgtgatcagtcaagttgttgatatcagcagtcaaaagagcaacttgaacttcaacagaaccagtgtcaccttcgtgagttgcgtattccttcataatcttttctttttcagtctttgaaattgccatagttaaattcacctttcattaaataattgccgttaacaacgtttatcgtcggcgtgaacaaataaacagcgttagcggttcacaacagtcataatcatacacattattttttaaaaaagcaagcagaaattaccttgcatccgtgatatttcttaagtataatggatgaagtaaatttctaaatcattggaggtgaatttcatgccacaaatcaaatcagctatcaaacgtgttaaggctcaaaatgctactaacgaacgccgcgcttctgaattaagcaagttaagaactgctatcaagaagtttaagaacgctgttgaaagtgatagtaaggaagacgtctccaagttgcatttagaagctgaacgtgctttggataaggctgcttcaaaaggcttaatccacaagaacaaggctgctcgtgacaagagtcgtttaaacaagttagcaaacaagtaaatcttacttattactaataataaaaagaggagatctgcagtgatctcctctttttgtatactcttagacatttaagataaataatttcaaaaaattatcttctcggtaagttccatttttatatttaaattctaagtcgattgcatcccttaataaattttctagcttgtctatcttcaaccgattacgtagggctaacttaaccctatagggatgaacgcctaattcttttacaatttgtggttcgctacgacctctttgtgctaagatcttaacgaccaaaatcaattctaattgattttcaaagaccgctaataattgaattggattagtcccttcacgtaattgattatctaagcgctcaactgcttcacggtaattcttatctaaagccgactccaaaatagcgaaaatattttgtgctagggacaaatctacattttgcattactgatttttcagtaattttgttatcggtagctaccatttttagcttttgataattgcttaaaatagtgtcaattacctgatcactccgctcaattagcagctgtaaagctgactgtgtgattatatatccctcatctttgatcaaggctttagtcgttgaagcaacttcatagggcctaatttgtggctcaaccacattgaattgctttagaacagttttagtcagttttttacgcctatcaattttttcataagaagcaacaattactactacatcttctaaatcagctaagttttcaaaaatcttttgtaagtcatcaatttgtttctgtaattttttagataccttagctgttaaaaagaaaggatttttgactacaataaatttctgttcactaaataaactggattcagttaagctcgcaatcaattcatctaagccatcgctttcgcaatcgacagtcacgtgctccaaatctttaaagcgatcttccttggcatatgatctcaccaagtaatcattgagaaagtcatctgcaccccaaattaaggtatgtggattattgttatttgtatttttaaacaaagaaagtaaggtcattttttatcccgctttaaaaagtaactaaatctaggactttgcagtccgccataataccagctaatcataccacagtcttgcgttgaaacccatggtatttgctgttgagttagtgtcgttagcgtctcttgatgggggtgcccgaacctattttttcgaccagcagaaataaaaacttgcttaggatggattgcacgtaaaaagtctggattggatgatgttttactgccatgatgacccaatttaaaataatctacctgaagtttcatcctctgcataatttccttttcaccatcttgacctaaatctcctgtaaacaaccaattcttattcgctactctaaaaagcaaactcagggaatcttcattctttccttctcctgcttgatatggataaaccacattaaatgtaatctgcggttctttcacccgcattcctgcaagtaactccaataatttggtatcttttacacgaccatctaatctcttttgaaaagatggattcttaattagtccttcggccataaataatttcttaacattaacctgctctagtaatggtcctaaatcaccaacgtgatcggcatcttgatgcgaaacaaagactccatcaattgtattaattccctgacttttcaaaaatggaatagtaattcgatcaatctgaggtgtctgctttttgccactaaagtttagtttcccaccagtatcaattaaatataccttgcgaggaaatggcgtagtcactagaatactatctccttggcccacatcaatgaaggttacttgccctcgcaaaggaaaatgaatcatgctgaagaaaattacatacaagctcaacaagcccaccataattttcttactattaaagcgccagttaactttttctcttaaagaaacaattaaaataatcgttactattaatagcaacagacactgccaccaattaatttgcccaaaagttagtagtcccaacttagtagcagataattgcccaatgattttctcacctaattcaagcactttttctaataccggagcaaaatctttagtcagaccaaacgtcacaatattgaaaaaagcaattggtaaaactatccaattgaaatatggcactactaacatattaaaaattacagttaaaaaattgacctgataaaagaaaagcaatagtaatggcgttaataaaatatttaacaaaattgcttgtttaaaactgccaaacttatcagttaactgtaaacccaatgccaaaatatagctcaataaggctccagttgccagaaataaacgcggtactactaaaagatgtaaaatgcaggtcaatcccagcagatctatcgacgcaacatgatatttcttaaacttacaaattttgcctaaaaagtaggttaaactagctcttacaaagccggcttgaccattgcttagaaaaatacctagcaataaaaccaatgtacagcagacaaaagtttcttcatccgtcagtttcaagttaaaacaaaatacactaattaacaagacatagattccaacatgtaagcctgaaatgcttaacaagtgaataacacccaaatctcgataattatttagtatttcttgattttcttgagcattattttcacccaagattaattcactagcgaaaaagcctaataactgtggcatcttggcaaaatagttctgcaattcaaaacgtaattgatgcaattgatccccaaaatcagtaatcgataatagcttcatttgacaactactgtatttcaatttttggtaaatctgttttgcctgataataattctgaaaattaaactcaccaatattagttgctggctcaattgaattgcattccccattaatttctgtcactaaaatagggttcccatgcttaagcagttctttttgaacatctgttaccttgccaccaattaaaattttaccttgagcgaaattacccacacctgttaagtagtcgtctttaattcttacctgatcagggtaaattcttaattggctctgctgggttaaaacaaaattggtttttggtttacttaaaaaaatcagtaatagaaatgctccaactattagactaactatttttaaactaactcgatatttttgtactaacagtagcaaaaagtaacccagaaaaaataaagctactattttttgcaccattgttgtacaagaaaaagccaaaaaagagattgtaattagcaacaaagcggttattaagtaaaagccaacttcatttttaaacagccaattgatctttaaggctcgcaaaagttttttctcctattcctgatacctgcattaaatcttctatctttttaaaagaaccattttgttcacgataagcaataatctgttctgcctttttttgaccaattccagttaacttttgtagttccgttacattagcagtatttaagttgatcttagtgccatccccttgattacttgggctactgctactagtactcccactattttgactattatcagctgatcctgcagttgccacattttcaaccttttcacccttgtaaggaatatgaattttatcttgatccttaagcaaagtagcgcggttaatagcttttaattgtgctctagcagtagtacctccagccgcctcaattaactcctgcagacgagcaccatttttcaatgtatatactccctgatgcttcaccgcaccggaaatatcacaagttacagtcttagaaacggttgttgaactactgctagtcactgcattagtattagtggttgcacctgaactactagtgctagactgcataacttgatcctgcactgcagcagcattttcttgatgatcccctttcttcaatccataaaatccaactacaagaattattgcaccaatgagatatgcttttttctcaagcacaaattcttttactttttcaaaattcataaaaatcacctctactatttattacgcaaaaaaagcccagaattttttctagacttcaaattttttgaatttttttagtagtgtgtctttagatagtttaatgcatcatcaaaagtgctcacagggacaattttcattttggtgtgaattttctttgcggttctcttagcaaccgcataattagtttcacttttcttcacactggttgaatcagtcggcgcaaagaagacctctgcaccttctctgctagcagctaccacttttttatcaacaccaccaatgattcctacttttccggtaggtgaaatcgtacctgttcccgcaatcttatgtcccttacttaagttctgcttggtaaagacctcatagctttcaagtgtaaacatcaatccggctgaggggccaccgatttcgccagcattaatttttaacttaggcttagttttcacaactacatgctcaactaattgaatcccaattcctggcttattagtaccctttactttaacaattttgccagtaaagtgtttctcttgcttaccacgcaaaactgagattgttactcgtgcaccaatcttttgtttacgcaaataatccatcatctcttcagttgagctgaaacgatgcccgtttgcgcctaaaacggtatcaccaatttggagcttatttttaaaactagaatttttctggacttccattacataaacgcctagatattttaagctatgctggttacctgcttttttagctgcataataaattgcattctgctgacttgtttccatataccagttttgcaactcattatattgagcactagtttgacctcctagcagctccttgcttgatacacgctcatcatacggacgagtaaaactccatagatattgcaaaaccggagccggccgactagttatgctaactgtcaccaaataaaaattattcggacgtttatttgatgacttaataaactggcccacgggcattgcctcaccaggatattcaatataataatcggtcggccaaacagcaagtaccactaataaaacaagcgcaattagtgccaagagccaattacgcaagtgctttttcgattgattgtttttcttattattcatgttttagcttctctctcaatgcaatcgctgcttttttaggtaaaaacagactaacatcttcatcaaaacgagctaattccttaatcatgcttgaagctacaaaagaattttctggactcgtaaaaagcaaaactgtattcacatctggagccaattttttattaatcccagcaatctcctgttcatagcggaaatcagcactgttgcgtacaccgcgcaccataactttagcatgcaattcatgtgctaaatttacagttacttcttccggtctttctagcacttcaatattaggtatttcccttagtgcatccctgattagatcagcacgttcttcaggcgtaaacaagtatttcttagctgtattggtcatcgcaactacatatactttatcaaaaatttcagcagcctttttagcggtctccacatgcccattagtaatcggatcaaaactccctggaaataaagcgattgtcattattagtcctttcgataaatcctcacaattgtttttcctaaatggtgttctttgatcaatgaaaaaccagtaatttcacccagttctgtatgatcatcagtttctgctaccacaattgcatgatcattaagtaggttcgactttaccatctgcaacatgtccttagcgattttttctttggcatagggcggatcaagaaaaactagatcaaacttttcatcattctcagaaaataattttaatgctgcagagctgcgcatattataaacattaaaacgctgctcttccttagttaaagcaacatttttcttaataattgtacaagcagcatgattaatatcaaccagactcgcatggtcacagccccttgaaacagcttcaattcctaaggcaccactaccagcatataagtctaaaacattaccaccctgaaaaaattgtcccaatgaattaaaaagggattctttcaccttatcactggttggtcttgtccgattacttttcaaagtaaataaatttcttttagcatatttccctgaaataattctcattttagttgattctcacttttttcttgttcaagttgcaatttcttttctgctttttgggccatctcagctaattgattttcaatatgttggctatccaaatttacttcttcttcagctgaaatttcgacatgattaacaaaatccaaatgagcaatttgtcctttgatttcattgcattcgttgcgattaacataaagaacacaatatttcatttttttagaaaaataaacaatgtcaccaaaatggcgcaacttatattgatcactaactgattttaaataaataatcaatgctacccttttaattaagtgggtactttcaatttctttattgatactcatgcaactgtttcatccttttcctgtaacattttttcatttgctgaaacgttcagtactaaaccaatcgcagcagtcaagacaatcattgatgaaccaccatatgaaataaatggcagcgtaacccccgtaatcggcaacaatcctagtactgcaccgatattaaagaatgcttctgtaaaaataatagtcgtcacgccaaagcaaattaatgcgtcgaattgagaaaccgcgtgaaccccaacttccataatctgccacatcaaataaaagagtaatccaaccaataaaattgtcagaatcacacctacttcttctgctgtaatggataaaataaagtcggtatacggctctggtaagtaacctcgcttttgcatactattacctagtcctacgccaaataatcccccattgtggattgcataataggagttaactagctgggccccacctttttgctctaattcaaagggatgcaagaacgacattagtcgttggaattgataacttctttgtaaaaatccaggattccaggcaactacaataaaaaatacagctgtcactaagatcacaatcccagctaaccaagttaaagctaatttagttggaacccctgatactgaaaacattactaaagtgatcataaataaaattgctgtcccaccaaaatcaggttcaacaataaccaaacacattaaaaaagccgccaaaattgctgggtgtgacaaattatgtttgatcttacccttgactaattttccatctcttctgtctagtacatatgacaaataaatgaccagagccaatttagtaacttctagtggctgcaaattgataaagcccaagttaatccaacctacagcaccattaactgccgcactactgccatgagcaaaacgtagaaatactagccatcctaacataagtatacaaattaataaaaatccccctacaaactttggatttttaaatactttgattcttaatgcaaaaaacggaatcccaaacaaaaagaaagctactatagcatagattgcttgccgtatcccatagacatttggcttaaatccattaactaataaaatatctgaactagctgaatataccaaaattatcccaaccactactaaaataagatagggaataaaaatctggtaattaagataacgtaattttcgacgcacaagcgttgcccctttatctaaataatacttttttcattataaaacaaaaagatcatcacttctatcaagtgacgaccttttaaaatttattaaactatcttagttagcacggttacgcttcttatcagccttttgacgttctgaagtgttcaaaatcttcttacgtaaacgaatagattcgggagttacttcacaatattcatcatcatttaagaattcgatagcttcttcaagagtcaacgttctaggagtcttaatagcagcagcgtggtccttaccggcagcacgagtgttagttaagttcttacccttagttacgttaacagcaatatcacgttcacgtgatgattgtccaacaatcataccttcgtaaacttcaacaccagcaccgatgaataactcaccacgttgttctactgattgaagtgagtaagtagttgattgaccttggttaatggataccaatgcaccattacgacgacctgggttccagttctttactactggcttatatgcttcaaaggtgtggttcatgataccatatccaccagtttgtgacatgaattcattattgtaaccaatcaaaccacgtgatggaactaaaaattcaagacgagtttgaccattaccagttgattccatattcttcatctcaccttttctttgtgaaagtgagtcaataacagaaccaacatattcatctggagtatcgatttgtactgattcaaatggttcgcacatagtaccatcaatttcacggtaaataaccttaggacgtgaaagttgtaattcgaagccttcacgacgaagttcttcaaccaaaattgaaaggtgaagttcaccacgacctgaaacagtccaagcgttcaattgatcagttggttcaaccttcaaagaaacatcggtacgagtttgacgaatcaaacgatcttcaagcttcttaggagttacttgatcaccttcacgacctgcaaatggtgaatcgttggcaacaaagtccatttgaagagttggtggatcaatcttaagaagtggcaatgcttctggatgttcagctgatgcaatagtttcacccacgtagatatcattaataccactaatggcaataatatctccagccttagcttccttaatttcgttacgtttcaagccaaagtaaccaaataacttagtaacacggaagttttgagttgaaccatcacgcttcataacagtgatgttgtcactaactttaaccttaccacggtaaattctaccaacaccgatacgaccaacatagtcatcccaatcaagcatggtgatttggaattgtaatggctcatcagagttgtctactggagcaggaatattcttaataatggtatcaaagattggatccatagtttccttttgagtacttggatctggatcatatgatgaagtaccattcaaagctgatgcataaacaactgggaagtcaagctgttcatcgttggcacctaattcgatgaaaagttcaagtacatcatccaaaaccttcttaggacgagcgcctggacggtcaatcttgtttaaaacaacgataggttttacgccagcttccaaagctttctttaaaacgaaacgagtctgtggcattggaccttcataggcatcaaccaaaagcaatgcaccgtcaaccatgtgcataacacgttctacttccccaccaaagtcagcgtgacctggtgtatccaagatgttgatagtagtatccttatacttaacagcagtgttcttagacaaaatagtaataccgcgttcacgttcaatggcatttgagtccatagcacgatcttccagattcatgtgttctggcaaagtatcagattgcttcaataattggttaaccaaggtagtcttaccgtggtcaacgtgggcaatgatcgcaatgtttcttagatcgtctcttcttttttctgacaaaagtattcctccccactcttcaataaaaaaactgtgactctgtcacagtttcggtaacgcattagcgccttatcgaagtgcttttcttaaatctgtatagttacgttagtgaattttaccacctaactgcatacgggtcaacgcttaacaatcaagttaaccctggatttttttatgcaaaaacaagcaaaaactattaaactatggtaaaaatataatgtagataataatttttaaaaaggagtaattattttgatcttaatgaaagatatcgtacgtgacggtgatcccgtcttacgtcaagttgccaagcctttaacatttccatttagtgatcactataaaaaattagctgatgatatgatgcaatacttaattgattcacaagatcctaagattgctgaaaagcaccaattaagagcaggcgttggcctagccgcacctcaagtaggtgaaggtgtacaaatggctgcacttttagttcctgatgatcaaggcaaaattatctttaaagaagtttatgttaacccagagattgtctctgaatctgttcgtcaagcttgtcttagcgaaggtgaaggttgccttagtgttgatgaagttattaatggttacgttccccgccctgataaattaaccattcattactacaccgttgacggtgaagaaaaaaccattcgcttaaaggattacccagcaattgtttcttctcatgaaattgatcacttaaatggtcacttgttctatgaccgcattaataagcaggatccattcgcacttaaagaagatacagtcgtaatttcttaattgttatttaaccaaaacaaaagcctgcagatgcaggcttttttgtataaaaaaagtcactggttaactaggccagtgactcatacattgggaattaagaagattgaagagacttcttataacgagcaaatgaatttattaatcatttactacatgattatcgtacaactgatgttattttacgtcaataacattgaccaaatttaatcggtaaaaatcaaaagaaacataattatatacttaactttataattatgataaaatttttatagctattgagtaatttttactctacattgaacgtttatacattaataaggagaatcatttatgatttacaaagttttgtatcaaaaagacaagattgtcaatcctcgtagagaaactacacaaactctttatatggaagcagacaacatggtcgaagcaagaagtatggttgaggacagtaccccctataacattgaactcatccaagaattaactggtaattcgttaacttacgaaaaagaacatgctgactttaagttaacaacgttcgacaagaagtaataaagagtgcgaattaaaaataatgaagtagccgtttatgcaatcggggggttgcatgaaatcggcaaaaatatgtattgtgttcagtatcaggatgaaattatcatcatggactgtggtattaaattccccgaagataacctattaggtattaattacgttatttcagactattcttacctaatcaagaatcgtaagaaaatcaaagctcttgtggttagtcacggacatgaagaccatatcggtggtattccatttttgttagaaaaaattcctgaaattcctgtctatgcgacaccatttgccctttcattaattagaggcaaattggaagaacacggaattttaaagacaactgaactacacgaagagcatgaggatactgttttgaagtttaagaaactttccgtttctttctttagaactactcactctattcctgatactttaggtattgccgttcatacaccactcggtgccgttgtctttactggtgactttaagtttgacttaacaccagtaatggatcaacctgcaccagattttcaaaagatggctcaattaggcaatgaaggtgtacttgctcttctctcagattcaactaatgctgaagtaacacaatttactaagtctgaacgatttgtagctaagtcactacataatatcatcactggaatccacggtagaattatttttgccacttttgcatctaatctttatcgtgtatcaactgctattcaagctgcaattgataccggtagaaaggttgcaatttttggacgtagtatggaaaatggcgttgataatggggtcgacttgggctacttaaatttgcctaaggatctaattgttgacgcagatgagatcaacaaactaccacctgaaaaagtaatgattttatgtactggttctcaaggtgaaccattagccgctttatcgcgaattgctaatggtactcaccgtcaaatcagcttacaacctggtgatacagtcatcttctcctctaacccaattccaggtaacacattaagtgttaaccacttaattaataagttaatggaaggcggagccgatgttattcacggaagagtaaataacgttcatacttccggacacggcggccaagaagagttaaagatgatggttcgcttagttaagcctaagtacatgattcctgttcatggtgagtacagaatgcaggttattcacacccagcttgctcaacaagccggtgtacccgctgaaaacacttttgttttatctaatggtgaagttgtctgctttggccctgatggcgctagaatcacaggacatattcctgcaggtgacgtttacgttgatacttctggtactgcagatgttggcaacgttgttgttcatgatcgtcaaattctttctgaagaaggtttagttgttgcagttgctacagttgattataagcacaagcgagtcttagctggtcctgatattctcagtcgcggatttgtctacatgcgtgaatcaactgagttaattagtcaagcgcaaaagcatgtttatcatgtgcttagaaatgaaatggctaaatcaaatagaccaaaagaaagtgacattaaaaaggcgatcaccgaaaatctttcagacttcttgtattccaagactgaacgacggcctatgattttaccaatcattatcgaaaagaaatagtaaaaaagactccttagggagtcttttattttagaaaatgaataatatgcataaaaaaattaaagttcagttattagttaatgaggtcgctgggaatggcaatgctattaaagctgataaagaattacaagatatactaaaagaaatgaatacgcgtggtgctagttaaatcgttctagacaataagccaaattataagctaaaattgcaatttccaaccggctttgaaagcctatcagactacgtgctcgattgttctcggcattgtaataggtcagaagcgaaaagtcgctttcaattgttctgcgaatagccatcaattgatgatcattgtgctttttagctcctgtcatatttttacgatatggtgtccaaagttcgtaacccatttgttttagctgttgatgcagttctttgcctaaatagccttcgtcgccaagaagatagtaattagatggatgggtattttctatcagttcaactgtctccctggcatcatgaactgatgcctttgttacgacataatcaagaatgtaaccgtcatcgctaacaatggcatgaactttgaaaccatagaagtaaattttcttggtggccttataaccaatgttggcataaccgcgaaaaattttagcacgatagtttcgaattggttggcaaacaggtaccggaaagctgtcaatgatcaagaactgtccattcaggtcaacctttttattcatttcttgccgtatctgataaatcaattgcaatagctgacgtgaacgccgattaaaacgtgagtgtgataaacaattgaaacattcacagaatcttctttgtgattcaattcctgtcttagcttgccagataagtaaagccaaaatcagactgtccgtagttttaatttgatcaatatttcgccgatgagtaaactcagccggtgcatacaaacgataccagtgccgacaaattatcactaaatctttaaaactaacttgtaaatggtggctaaaacgcttaagcttaaggcagttcaatcagatcagactcttttctattattactatttacaagtcgagtctaacaagattggacttttttattaactaaaacgatttaactagcaccacgcgtaaatgaatattccttttaagcgacaaaaaagtcattatcctggagaattagtcgttctagcacaaaattacgctaatttacatctctcttctgaacatgttttaatcgtagttggtggagatggctcctttaatgaagttttaaatggaataaagacttctaattatcctgagacagctattacttatttgcctgcaggaacaggcaacgattttgcccgtggtgctggattaaccgcagatcccaggcaattaatcaacaatttgctccgagatcctgaactggaacaagttgattgtggttttttcacatcaaatattaaacaaattcctaagggttactttgttaataatttcggtattggttttgatgcctttgttgttcatcagagtaatcatgagcaattaaaaaaacacctcaatcacctcaattctggaaatatgatttatggcctaaatataatcaaggcactaattaagcaggatacctttacagtgactgttaaaactaaaaacgaaactcttcgttacggagatgcatactttgtcactactactaaccatccctactttggcggtggttttgctattttgccaaaagcggacatttacagtcaccatcttgatacagtaattgttgaaaaaccgagtttacgcaagtttctctggctttttggtaagctgatcaaagatggttcacacgttaatgcaccagaatttcattatattgaagctaaagaaatcctagttcaaaccaataaaagtgaatatgctcaaattgatggtgaagatattgaaaagcagcccttcaaagtaacatttaaagttgatcattttaatttattaaaataaggaagaattccaaattcttccttttttatatcttatctaaaatatctcttttcgaattatgattttgataatattggtcctgatcaacgaaatcatgtacttgatcataaaatttcttccaataacggtatttttgatactgcttttgccactcccgtgcttcctgcaagtaattaccaagaagtccattaatctgatcgatatgtttaatcacctgattagcatgatacaattgctcttccacctgcttttgagttaacgttgactcctgatcttcaaaaaatagaacattttcttgataatttttttcttcttgcaattgtttactattgtccatttcttctttgatagctgcaatttcgtctggctgtaatccaattccagttttagctttgactaataacgactgaatatctgccaattgcacaacatctatttccattttttgataacggttcgaatcagtcaatgtgaactcatcatctgttctacttacaaatacaaccacgtttctgattaattgatctatatttggcaagcgtctcaataaattaataatcactgggttgttgcttttttctaggacatatttaatactttctttatgcttggccacttgatcggctatctgatcataatcagcctgcacattatactgtccatttttacttgttcgtgctttggtttccaagcaaaaaatcccgctagtcgtaattatcacatgatcaatttggttactccctaaactattctttttttcatagggatatggtaacagtaaattatgaattatttctttccctgtctgcacttcacgtaaacgagaattcactaattcttctgcggcagcgcctgccaagagattgctaagatggcgcaaatcacgttgagataaaatattcataggtcgcaaatgttttatttgattcaaatgtagttcagtcattcttttctgaaatgcgtttactttttgattgtaaaccttatagccagaattaattgcccgaattcgtaaaacattttgcagagccaaagctcgtttcaaatcacgtttattattcaacaaagttttttcaactatcatagcatcatgaacagtttgtgaatcagttacttttttatgtgtaatccaagctttttgataactagcatgattttctaactcattcacatactgatttaagtcattttccaaaggcaaaattttgtttctaccttctttgactattgagccataatagcgcaaattttttgtaatttcgtctaactcattgaattcatgtttgccataatggtaagttaccttagtttctccattccaactagtcttacgccaataatgaccatccgtctcaccaaattcaactaattccgccactgaacgatctaaatagtacttaatcaaataatgacaatggcctttattgtcaaaaatgcgtcgcttaatataacccggtcgcattaattcaatgatctgaaaggtcaagttcttatgattaggaaaacggtatggtaatcttttgcctgcaattttttcaattttagttatttctttcttatctgttacagataattctatttttttcattttcttcttttttcgcttttgaaaaaaataataggttaataagcctattgttagtgtaattattgtaatatccatgttaattatccatattttggaacgtatgtttagacaacaataattataccatgattttgtataatgaaaaagccccttgttttaacaattcaaggggcttttatccttataatttgatattttccattccaatcattggatcaatttcaccagaatatattttttccgaggttagaacaaaatcttctgctacttctgctttatcggtttcattctccatttcttgagctttttcgtgctgcttgctttgatcagatttatccaatgattttgtaatacccaattgctgacaaatcttcgctgctaagccagtcttacgatcatttcccggcgtcttaaaagctgccacaaatgcccgtggatcaccaactaatactaagtttttctcagctcgcgttattgcagtatacaaaaggtttcgttttagcatcacaaaattctgcatggttagattcaagatcaccaatggaaattctgaaccttgtgatttatgaatagtgattgcataagcccgggtcagatcatttaaatcttttctagaaaaggcaacttctcttccatcaaaatctgcaatcatgcattccttggcatcatcttcatcaatgctaatgatcttaccaatttgtccattataaatatctttttcaggattattttgcaattgcagaatacgatcgccaattcggaaaacttcattatgtgcttctaataccttacttttaggctgagatgggtttaaaattgcctgaataacattattaagattagttacaccaccattgccaagatacatcgcgctaagcacttgaatatcatcttttgcaaatccacgttttaaagcaagtttaacaatttgtccaactgcatcccctactaattcgggacgacagctaataaaagaataattatttgttttcttaaacaatgcttgctgatctttaccctcattaacatcatgcgccaaagtaataatcgttgaatcatcaccctgtctatgaatctgcttcaaaatagtagttggaaacgcttgcgatttaatcaggtcactgaagacattgccagctccaaccgaaggtaactgatccttatcaccaacgaaaacaatatgccgcgtatcatgaatacttgccaaaagttgtttaaaaaggaacatgtcaaccatcgacatttcatcaacaattaagatttcaccatttaactcattcaagtcctgagtgttagtatcaccaatacctaaccccaacattcggtgaattgttttagcactgattccggtaatttcacccattcttttagctgcacgtccagtcggtgctgctagtaaaaacggaggatcttcactgtaaagagcggaggaaggaatctcagccagcttgcgtaatactaataaaattccattaatgatagtagttttacctgtacctggtccacctgtcaaaatagaaatcggttggttaactgcgtttttgatggccaacttctgtgtatcgtcgtagtgaatcttaagttccttttcagcatccttgattgcttgctctacctttttatcatcatattgttctctttttttatcttcttttttttctaccaagtttttcatcaagcgagcaatatcaacttctgtttgataaatattttgtagagcagcattctcaccatcaactattactttgccagcttcttgtaaactattaatacagctagcaattgggtcgaattgattgatttgaagcaatttacttgcttctgttaataactcagctaagcctacataagtatctccctcaccatttaaagcatcgagtaatacttgataaacagcacctttaattctacgtggatcatcactagcaatatctaattggcttcccatcatatccgcggttttaaatgcaaaacccgaaatatcattaactgctgcataaggatctttctctagttttgctaatgcttcaccatgataaagctggtaaacccgtcctgcaatacgcttattaatgccgtatttagccaattttaaaattacttctgaataagaatccatcgcatttagtcctgccaaaagactatccttttgctttctagttaaagaaagcttatcaatcttagctggactttccttcaatacatctaaggcatttagccctaattcatcaataatcgtagtcgcagcctttttaccaattccagggaacttattcgaactcaaatacttagttaaagatccctcttcatgtggcaatacttgcttatagttatttgctctaaactgcaagccaaatttttcatgcattactagtttaccctcgaagcgatagctactattaatttgaatatcgccaaaattccctgtcaccttaatatcgggacgagaataatcggataaagtgccgataatttcaacgtcaagaattttatacaagtctttactattttcaaaaacaatcccgttaaccttaccggtaaattcattcataatttttcttttccttgtcatttagcatcttcataattgaagcatactgattcattgcttgttgataatacttagcatccatctgcttagcttgagcaaaatatttttgagcctggtcacgatctttttctaatgtagtgacacctagtaaaaaataaactttcgcatttttcttattatcaggaattgccaaatacatttgctgagcctgttgattctcacccaaacttaaccaaatatcgcctagcaattcctgaattcgctcatcaatttttttgatcgtcaaagcataagctaaagctttttggccttgccctaattttaagtaagttagtgccttttgataaagagttaagtcatcattaggtatctgatctaataaagccagtgctttatcaaaatcgccttgcatgtaataacacactgccagattataatttaattcttgtggctctttaaccagatgctgggcctgctccaatagcttctgtgcttgatccaagcttccttgctcaattaaatacgtcgatagctgcaaataattagcaacttgttgtggatgctgatcgatttttttgattaaaagatgaatggcttgttctactttaccttcatcataaagttgcgctattttttgatccattataacgagtccgtcttcgataatttacgtcctaaataactagtttcattccacactaccggtttaaaagtctttccgccatctagtgtttctaagacagttaaagaggtattgctaaggccgccatttttgcgaatatctttcaatggatagcctaaaagtccacccataatagctgataatgccgcaccatgactaactgctagaatcttatcatcatcgtcaggaaatctttgtgccatttcttgagcaaatgcttttccacgagcaataacatgtggataatcctcaccatgaagttcagtcggatcatatttatctggatggtgccaaaaattatccatttgtttagggaattttttctctgcatccccaaacttcattccctccatatcgcccaaattaaactctctgagtcgttcatcgatcacaacaggtaagttagcgttcattgcatcatcgatgccctgagcggtattaaaggcccgatcaagcggactggcaaaaattcctctaaatttagttccttgcaagtgatgacctaatttttttatatcttctaagctttgtggcaaaagtggtgaatctccatgtcctccttggaagcgactagctaaattccactcagttttgccatgacgaacaaaataaatttgcattgcttaaatccccctaattgtctaatcaataagaatagtttagcacaaagaaaaaggcgttcgaaaaatcgaacgctctttttgcatattttttaaactaattgtaattgcttttcttcttggtaagcagcatcaatattaccgccacctaaacattcttcacccttgtataaaacaagtgcttgacctggtgtaactgcacgagctggctcatcaaagtaaacatcagcagtattgtctgcggcatgatacttaacagtcacgccgatatcacattgacgataacggaactttgcagtacagtgcatctcaaaatcatgatctggcttaccagtaaagaatgacatatcacttgcattcaagcgactagcatatagaagtggactatcatagccctgctctacaattaattcattcttcttaagatccttgccgaccacgaaccatggatcagttgattccttagttgagcccaagcccaagccctgtctttgaccaatggtgtagtacattaaaccagcatgctcaccaactaccttaccatcaggagtgaccatcttacctgatttagctggtaagaattcacttaaaaactttctaaagtttctctcaccaataaagcagatacctgtagaatcttttttcttcgcggtagctaaaccattagccaaagcaatctctctaacttgtggcttagttaggttagctagagggaaaataaccttactaatctgctcttgactcaattggctcaaaaagtacgtctggtccttgttaccatccttaggacgcatcatatgagtaacaccattggtatccttaacagtcttagcatagtgccccattgcaatgtagtcagcatccaagtccatcgcaaactccaagaacgacttgaacttaatctgactattgcacattacatcaggattaggggttcttcccttcttgtattcatccaagaaatattcaaaaacgcggtgccaatactctttttcaaaattaattgaataatatggaataccaatcttatcggcaaccttttttacatcttcatagtcttcagtagctgtacagacgcctgaatcatcggtatcatcccaattcttcataaagacaccaacaacatcgtagccttgttgtttaagtaaaagtgctgaaacagacgagtcaacgccaccactcatacctacaactactctagtcttgctattgtcaaccattattcaatcaatcctttacttcaagcaaaatcttacgctcctcaagatcctttaaaatataatctaaaagttctacagtaggagctaattgcttatttttaaaaatattaaccttctgcaaaccgttgcgatcagtaataaccatagttaaatgcgacaagtccttattaatggtcatctttaacttagtaggcgcgttataaggtgaatcattgtaaagaggatgttcataattaaaattacccttagctgtcttcacaaagccagcatcaatcaaagcataaagcttcaactcaagattcaaagtaaacttacgtttatcaccattaatcacaactgtatttgccataattttcctcacttatttataataagatactttctttttgaaagcaactatttatttttagattgaattctttgtacaatttttactaattcttgagcgaattgctcaatttcttcatccgtattataacgcccaaatgaaattcggatcgactcatttattcttggtgaattttctccaaaacaagcaattaaaacatgtgatggctccaaagaaccagcagtacatgctgaaccgcctgacacggcaaatccattcaaatcaagatttgtttgtaaagaagtagtagatacaccattgagatgcagattaagcacatgatgtgagtaacccggaccatacccaccattaatttcataattaatttgatgatcgtctaattcctttaaaataatgtcttgataatgagcatatttcttttgcaaagcatcacgaccaatctcggatacttcacggacagcttcgccaaagccggcaattcctggtacgttctctgttccagctcgacgtttggtttcctgctcaccgcctaaaatcaaatttggaatatcgatatccgcattttcatataaaaagcctaaaaacttaggtccattaattttatgtgcagaaacagacagaaaatcaatgttcatgtccttaacatcaattttaattgtgcccattccctgaacattgtcaacatgaaaatatgcattggagtcctttaccattgccccgatttctttgagcggcataatggtaccaacttcattgttaacggccataatcgatactaaaatagtgtctggcgttaattccttttttaactgttctaaagaaatttgcccgttttcatcgacattcaaatagacaatgttgtagccctcattttccaaacgtttcattggattaagaaccgagggatgttcgatcggcgtagtaataatctttttaccaatatttttacgagcataggcagttccaagaatcgctgtattattgctttctgaaccacctgaagtaaaaataatctctccatcttgagcattaatatcttgagcaatctggtgacgagctcgatcaattacatttctggccctacgacctaattcataggtactagaggcattaccaaaatcatttttcatttcatcggtaataatatcaattaccttgggtgacattggtgtcgttgccgcattatctaaataaatttcacgcacgtttaattcatcttttctacataatcactaattaacttagctgccttagcgccgacttccttgacaaacttgtcaaaatcattgtctgcattagcatccccattatcggaaattgcacgcatagcaaccaacggagttttaaaatgacgagcaacttgtgcaaaagcggctccttccatttctactcctaaagcttctggaaagtttttcttgattaactctttttgttcttctgattgaacaaaagtatctccagtaacaacaagcccttccttaaaatctacgtcttcttcacctaaatatttcttaaatgcttccctttcaggcgaattcaacttaaaggtagcaggctctcttggaatctgaccttctacatattcaccggcactaacacagtgagcatcgtgataggcaaaatcatttactaaaatcacatctttacgatgaacatcatcttgtaatgatccagcagaaccagtcataaaaattacatcaattttttctttagttagtaaactagtcagattcatagcggcattcactttaccgataccacttaaacctaaatatacatcattgccattaacagaaaaatgttcgaattctgttgatccgaacatttcttttgtttctgcatggaaatgatcacgataaaattcagcttcttccgccattgggacgataatcgcaatcttcaatttatttcctcatttccactataaatgaaatagtgctaatagcaccaatataattaaaacaatcactatcaggatagcacgattcaatctttttttcagtcttaaagacttctcttggcgaatcgtttccttatcactcgattgattatgctgataaaattcttgtccatccccagccagagggcgtcttctaggttcttcttcagagtcatcccgcttaaagtcaggatttacatctacttcttctgaatcattatcagaaaaggaagattttagcttattaagtaggctttttttctgccttttacgataatcagagcgtttttctaccataactaatccttattatcggtctgagcattacgcaacatcatattctcccaaacagtaattgcataaattgtctttgcatcaacaatttttccttcagccaataaagtttttaattcatctaagctataccaactagaagttaaaaattcatctgcatccagtgcccgcttatcagtcaatttagttaaggtatcacaatagaaaagatacatcttttcatcacaaaaaccaggagaagaatagaattcactgaccttttcccagtaatctgtgcgatagccaccttcttcattcagctcacgcttcattgcatcaagcggacttgcatcagtggaatcaaccaaaccagctggaatttccaaagtaatctgcttaattggttcccgccattgctttactaacaacatcttttgttcatcattaattgcaataacagccgatgcaggcttatgcttaataacttctctagttgcagtttcaccattaggaagcttaattgtacgaacagccagatccaaaatacgtccttgaaaaatctgctgtgacgagatttctgtttcctttaaatccaaaatcccagctcctttttaggctaaataaacatttacacattgcagaccatttttaccttgagctaactgatatttaactctttgacctacttgcaaagttttatagccttcctctttaattgctttatagaagacaaaatatgacttatgattacgatcatcttcaataaagccatagctactgccttcatcaaattgttttacagtacctaaccgcattagttttcaaatccttcttgaacagcttctgggtaatctgcttcaacgattttagcacaacgaccacaaagcattggcaactttggatctacgccaatatcagttctaatcatccgacaacgaggacatacttcgccttcagcatgttcaactactacactagcattattcaattgctttgcattatcaggtgcttcaccatcagcaatagttaacttagatacaattagaatttgtctgaaatcagcatccaagtcttggagcattgccttagtttccttatctgggtaaatagttactgttgcttcaaacgatttaccaattaacttcttatttcttgcatcttctagagccttcaagacgtcatcacgcaacttcatgaatttaccccaattttcaagcaaatcatcatggttagcatattcttcaacttctggcatattagcaagttgaacgtaatcttcaggttctttcaagaagccccagatttcttccatagtgtgtggcaaaattggtgttaagatcttagccaatttaacagcagcgtcgtaaataacagtttgcattgagcgacgatcatggctgttttcaccatcaatgtaaagtacatccttagcaaaatcaagataaaatgcagaaagatcattagaaacaaagttgaagaccttcttgaagacagtagtaaaatcaaacttgtcgtaagcagcaagacagtctttaactaagtcatttaatttcacttccatgtattgatcaactgaacgaagatcagcataagcaacgcgattttcttttggatcaaaatcactagtgttggccaacatgtaacggaaggtatttctgatcttacggtaactttctgcagactgctgcaaaattcccattgagactgcaacatcagaagtagtatcagcttgagctacccaaagacgaataatttcagcacccatcttcttaattacatcgtttggtgaaattacattgccaagtgacttagacatcttgtgtcccttatcatcaagcacaaagccttgtgataatacttctttataaggtgccttaccagttactgcaacagacgtaatcaaactcgaattgaaccaaccacggtattggtcactaccttcaagataaagatcagctggatagtgtaaaccatcacgtttttccattacgcctgaccaagatgaaccagagtcgaaccaaacatcaagaatatctttttctttagtaaactcgccatttggtgaatgttctgaagtaaagccttctggcaacagttccttagctgtatgagtgtaccaagcatttgaaccttctttttcaaagatcttggcaatatggtcaatcgtttctggagtaacaattggggtaccgtcttctgcatagaagatcggcaatggtacaccccaagcacgctgacgagaaattacccagtcgccacgatctttaatcatgttgtaaagacgagtcttcccccatgaaggaataaagttagcttgttcaatttgatccagaatttgatctctaaacttagaaattgaagcaaaccattgagtagttgctctgaagacaacgggcttcttagtacgccaatcatgtgggtatgagtgagtaaagaagcttaacttgagcaaagcgccagcctttttaagcttatctgctaccaccttgttagcatcatcatagaacattcctacaagatctggatctggaatatctttagtaaagcgaccttgtgcgtccattggactgaagaccgggataccatacttttgaccaacacggtagtcatcttcaccaaaaccagtagcgttgtgaactaagccggtaccgtcatcatcagtaacataggtgtcattcattaccaaaccatattggcctacaccagtcttaccataaaggggatgcttataagtcatcccatcaaaatcagtaccttttaattgtttaagtactttgtagtccttccagcctaagtcttctgcaatggctggcaaacgatctgaaccaattacatacttcttaccgtcaacttctactaaggagtagtcaaatcttggattaacggtaatacccacgttacttggaatagtccaaggagtagtagtccaaattactaatgaaacatctgaatctaagatacctttaccatctttaattggaaaagcaacataaattctaggtgatttaatatcatggtattctacttcagcttcagctaaagtggattcacttgaccatgaccagtaaactggcttcaagcccttataaatataaccttttttatacatttctccaaagacgcgaatttcttgtgcttcaaagtcatgttgcaaggtaatatatggattatcccaatctgccataacgcctagacgcttaaagtcggccatttgcttttgaacttgttcttcagcatattgtcgacaaagctcgcgatacttagcacgatccattgtcttacggtcaacgccttgcttagctaattgttgttcaactggaagaccatgagtatcccaacctggtacatatggtgcataataaccgttcatattcttgtagcgaacaatgatgtctttagaaatcttgttcaacgcatgtcccatatgaatattaccattagcaaatggagggccatcatgtaaatcaaaacgaggcttaccttcgtttaactttaatctttgttcatataacttgttatcttcccattctttttgccattcagcttcacgaacaggtagattaccgcgcatcttaaatttagttttacctaaattaagggtatctttgattctcattaacaaaattcctttctaaaaaagaaagcctcatcctaaaattaggacgaggctaaccgtggtaccacctaaattgaacttattataagttccacttaactttgcgtaacgtgcaaataccgtttagattaattaggcagctgatcagctcttaggctcttatgctagtcttccaccatcactagctcgctgaattgccttcaagctttactgtcaatctaatatgcttattttttatagtcgtcaggaaaaacaattgttgggcctaaaggatctgatttcatttcaggcttaacattaattgtttcatgacttggactgtccccggtcattggtttaggtgcagcattttcttcattatctgcatcgtcagaatcatccggttgatccaactccaaatcatcagggccttgagaagagtttacgtcattttcatcatcattgtcaacatcttcatcttcaacgtcttcatcatcagcacttactggctccgaaccatcatctggataataacgctctaagttgaagtaatcatccaatgcatgttgccacttttcatcattcaaattatcgatttcagtctgtagcatttcttgaatattactacgaaattcactaacttgctcttttacacgcatataatccgtagaaatagtatcttgttgatgcttttggaagttaatattatcttccgcttgctttttggcatccgcaataatctgcttagcctctgcttctgctttctctctaatttcatcagcagtttgttgtgccgaaattaatgatttatttaaagaacgctttttttcgttatattcattaacttgatcttgataatcatctactttttcttgtaaatcagttaactttttatttaaagaaactacttcattcttcaagtcaaccacttgatcaagtgtatcaccataatcatcaacaatctgatctaagaagctatctacttcaagacgatcatatccattacgaccacgccgtttaaattccttgttgtgaatatccatcggggtcaattgtgtttctttgtctgccaaagtctgagcaccaccttatatttaccttttcttgtagtcgaaacatcctcaatcaaaatccgaccaaagtgtcttaaactcaagacatcgtcttctttaatcattatattagaatctgctatttcatgccaatttaatttaaccagctgactattaatcatcttttgaatttgaccgcggctttgtctgctaatacccgataatacagcatcaattcgcattgaggcaactattttcgttttttcaatcgaatcatcctcaggaaccaaaacttctttgaagctaatcggtctcagctttacttttgctctgccaatgcggtcaatttgctcttcaaaaaattccgtcatttcttttttagtgaaaaactgccattttccttgattatcattaataatatcgccaaaaatacttgtatcaatacccgaattcgccaaggtgcctaaaataacactatgatttattttagtaaatttttgcggatattcaatttcatacggctgaatctgataatcactcggtcgcagattaagccattcttcacttaaataaactcgctttttctctgcattaggatagccaccatactcttgaacaaatgcatcattaccaacaattgttcttaaaattgctcgttttcccggatccaaaaaatcagtcaaaattggctcatgcttaaaaatcagctgattaaaaagaccagtaaaatagtcaattactggtctttcctcttgattaaaatgtgggtaaaacttacttgcctgtctgcgttccattacaccatcatcctcaataaaatatcaaatatccatcttaaaacatagttttgaatgaaatataagataaataaagcaataattggcgagacatcaattccagttgaataagctaatctcgcaaatggaccttttcgaaacaaatttaaatatggatttacaaccttgtctaaaaagcgaccaacaacagaattacttagcattggtagccaactcataattgcatcaatcacgatcagcagactataaagccataaaatccacgtcagtgccaagtagattaaatttaatatattaaccattagcttaaattgtctttcttatccactaaatcactaattttgccatcagtaacaaactttggtggagttgctaaaaagattttatcaccaatacgttggatttcaccatttaatgcatatacagtacccgtgatgaaatcaacaatccgacgtgctgaactgtcttccattctgctaaaattaatcactactgctttattatttaataaattttgtgcaacatccttagcatcggaatatacccgtggttcatataaaacaatcttgcttttagccgaattcaagcctgatttaattgaaaccacattatcgcgattaactgagttcagaggcaagtcttcattttcatttttagtctgtgaggcatattcttcgtcattttctaattcatcatcattagaaattccgaaaaatcttcctaatttatcaaaagccatttatactacctccaaaactagttttcactacgatgtttaaaaaatggaatatcactgttatcatcactatcgtcctgagcgctagtttcaatttgagaaatactatcctggtcttcatcactaaaagtatcaaaaccctcataatctttcttaggctcagtaggttgggtatttcttctttgattgtcttcgctatcatttagtccccaaacactggttggatcaaccatcgtttgcttaggctgctcaggttcttgtttttcggcagcaggctgaactgtttgtggtcgatcaactggttgcttaggttcttcagccttaggagcttcttctttttctttaactggttgagccttaatttgttggctacgacctggtaattgcttagaagcagcttcttcagccttagaatcaattccagtagcgattacagttactaccacctcatcgcccaagttaggattaattgaagtaccgaaaataatgtttacatcgtcaccagcagccttagaaacaatctctgaagcatcttgagcctcaaataatgtaaggtcaggtccaccagtaatgttaagtaacacttgcttagcaccatcaatagaaacttctaataatggtgaagaaatcgccagcttagtagcttcaactgttctattttcaccgctagcacggccaattcccattaaagctgcaccttgattttccattacagtcttcacatcagcaaagtccaagtttacgtagtcagttgaagtaatcaaatcagaaataccttgaacaccttgcttcaagacattatcagcttccttgaaggcatccatcataggagtcttcttgtcaaccatttcaagcaaacgattgttagctataataaccaaagtatcaacatattgctttagctgagtaataccttctgcagcgtttttagagcgcttagggccttcaaaactgaatggacgtgtaactacgcctacagttaatgcgcccgtctcacgcgcaatttttgccactacaggagccgcaccagtaccggtaccgccacccataccagcagtaataaagatcatatctgcacccttaagtgcatcttcaatcgtttgttcactctcttctgcagctttttgtcctacttcaggatgtgaaccagcacccaacccacgggtcaacttaggccctagttgaatcttgttttcagctttgttgctgttcaaagcctgaacatcagtgtttgctgcaataaaagaaacaccttgtacgccatcgtcaatcattcggttaacagcattgccgccggcaccaccaacaccaattactttgatgacagcattcttattgtcgtctgaatcgaatgtaaaatccattaaattaaccacctttaatcaaagaatttcttaaagaaactcttcaagctattagttttttcttgcttagtattattttcatcgtctggcacagattctgttctggcagacattttgcttctattataagcttctttagcttcactttcactattagaagtcgtacttttagaaatcttggtactttttggctgagaaacggggtcttccacagcgggttcaccaaaaccatagattacgccattaacaagatagtcaacttcagacatcttatatgaatagtggacgataccataagcagctgtataaatcggattacgcataccaatttgatctggttcataaattcgagccttaacatttaacccattagcagtcagactatcaattccttgtaataggctactaccacctgtaatcacaataccacctggttgcttcaatgcattatgcttaactaaaccttttcctaaacgagtcaaaatttgttctaagcgtgcattaataatttcactaagatatacttcgtcaaccatttgctgactatttgcaccaacactattaatagcaaatttatcgttttttgaggcaaattgtggatccgcaaatccatagtccaacttaatttgttcagcatcctttttcgaaatacttaaaacagcagagatatcattagtaatatcgcttccgccttctaaatcgatgttggcatacttaatttggccatctttaataacagttgccgtacttacgccaccaccaagatcgataattaccgaaccaaaagttttttcactttcattcaatgctacacttgaaattgctaaaggcgttggcacaaagaaattattatgataaccggctctttcaatagccttcttgatattgtgcaaaggactagtaggtgcagttaataaaattccactaacacccaaggaacgtgcaatcatttttcttggatcatcaacttcagttttaccatcaatcaaaaagcgactcggcaaaaatgtaattgcttcacgatcatccttagctgctgaatgaatcgcagatctaatcgttctttttacatcatcattatttacttcttgcccttgttcaccaacattagcaaaaccagttgcagtttccagttgtaacatccctaccggaattcctgtaactacactataaatcttggcgtttgttttttctgctacaccttttaatgcacgactaattgcactagcagtttgatcaatatctactatttgaccgtgtcgcattcctgaatttggcgttgtaactgcaccgataaccttaccagaatctgcaacaacggcttttacacttgtggttcctatatctaaacccactaaaagatttgaattctccaaaattaagcccccattaatatttgccttgaaaaaattctaacataaataaacttgcaaaacagctacgatatgccataagctttcttttcactagaagttaatggtctactaaatgcacctatttctaaatcaataaggctatgtttaccagctttaattctaatagtatcataatattttagtttgctattcaaagtagcagtattgccaatcactacattaccgtccttcattactaaaataatttgtgaatttcgtctggtattcccacttaataattttacctgatttttaaatgaattaggtaaactgttaaataactttaaatcattttttaactcatctgatttattatagccaacaaaaataggtttatcttggttcacttttgtccaaggtagagctctcgtacctatttttccattatccaaaatctttcggtaagaataaccatcttttaagtaacccacggttttacgttcattaatttgtaaaatcaattgattaatatgacctaaatgaacttgtgcactttgaatttctggatatttttgggataatctttgactcaaatctttttgttgaaacaagtaatcaaaaactttatcgctagccttgatcttggataccttaacaatttctttagcaggtaaatgctctgcaccaattattttaacagtactgatattcgctaaaggtgaaatatagtatcctaaaccagctatcgccaaaactgaaaccgtcattatcagacctagcctacgtcgtaatgatcgtcgtctttctgcctgtaaatttgagagtgaggcagaaatcttggtctgcgattttcgactattcctttgttggttaaattcatgattcaagtacggagacaattctttccttggatcaatcttagttactggctttttggccatctgcctcacctacctcctagcgtgaaatttcttccatcaccttaatcacttgatcagatgcatcaggtacgcctaaagccttagaagctttgctcatttcagtagcatacttttcatcgagcaaaatatggtcaattgaagagacaaaattatttggatttaaatcatcttctggaataaccaatgctgcaccagctttttctaaatcaagcgcattcttcatttgatgattatgagttacattagggcttggaatcaaaataacgggtacacctaatgcagtaaattctgcaatacttgttgcaccagatcttgaaacaacacaagtcatttctggcaatagacctggcatgtttttaatgtatggcaaaactttaatattattaccaatatcaacattcttaattttttcttgtaccttatcaaaataaaaagtacctgttgcccaaataatttgatatggtttttgctttagcatcattaatgacttaagcataattctgttaattgctaatgctccacgggatccaccaaatactaaaacagttggcatttttggatttaatccccatgttttttcaagatcaattttttcttcgtgcaagcttaaaacttgttgtgaccgtggattacctgtcttaactagtttcttcttttctgagaattcctttgcagcatcatcaaatgtataacaaattttatccacataatgacccaaaaatttattagctaatccaaccactgaattagattcatgaatcattgttggaatatgcattttagctgcttcataaaccatagcaccgctaacgtaaccacctgtacctaaaatgacatctggtttaaagtcccgtaaaatttggcgtgcgcttttagtagcttgtaaaaatagcttgatagtctcaaagttttttaacggatgtttacggttaaagccttgaatcttaattgttttaaagttaacaccggctgctggaacaatttttgattccaatcctttttgtgtacctacaaataagatttcatcgtttttactaataccgcgttctttcaaacgttcaataattgccataattgggtaaatgtgaccgcctgtaccgccacctgtaaaaataactctcattttatttagtctttaattcctcaacaaatctaacaaagtaatcgccacgttcttcaaatgttctaaattgatcccaagaagcacatgctggtgagaacaatagtacatcgcctggttcaactaattcccaagcacgaggaacggcctcttgtagtgtattaacaattacaatgtccttaattcctgcttttctagctgcgtcagctaacaaatatctagtttcaccataaagaacaattgacttaacatgttttttaaataatggtaccaaatcatcaaaagtgaagccacggtctaacccaccagcaatcaatacttccggttgcttaaatgatggaatagctacagttgctgcttcaatattagttgacttagaatcattataaaccttgcagccatcaagtgttgttacatattgcaaacgatgcttagcgccagtaaaggtgctcaatactgcggcgatatcatcattatcagcgcccataattttagaaattgcaatagcgactaaactattttgcaaattatgaatacctggtaatttaatatcagaaatcttcataatcttttcgttttgactttcaagatattcatcgccaatgaaataatcagcattatgatctgtctcagaaaaagtttgcattttagctggtgaaacttctttttccttagccaaaatatctttttgatcataattagcaataaagtaatcattactgttttgcgttctagttacattcaactttgcattgacataattttcaaaagtcttgtgataatctaagtggacgttgttgtaaatatcaacgatcgctgcaactttaggatcaatatcagttacacccaaaagctggaaactagaaatttcaactactaaaatatcatccttagttgccttaggtacaacttcagaaatcggtacgccaatattaccaactgcataagcatgatgaccagatttttgcaaatgatggtccaaaattctttgtgtcagcattaccgtagtagtttttccatttgaaccagtcacacaaacatagggagcatcactacaacttaaggcaacttctggttcagtaataatcgggatattcaactcctcagctttttgaaccatcggattttcatagggaatacctggatttttaactaaataatcaaaatgttctttttcaagcaaatcaactggatgatgaccgccaattacgcgcacgccgcgacttttcaattcttgtgccttagcatttttctccaaatcagctttatcatttaaagttaaatttgctcctaattgcaaaaggagttcgctaacagcaaaaccacttttacccaagcctagaaccaaaatgtttttattattataagttttaatatccttcattttatgattatccccaaattactaaatacaaaatactgccaattaatccaactaaccagaagacaatatctactttccattctgaccaacccaacatttcaaagtggtgatggataggtgtcatcttaaaaatacgcttacccgtagtttggaaagaaattacttgtaaaattacactagcagtttcacaaacaaaaacaatcccaactaacaataatgaccagggacggttaagcataatactgattgttgctaaaccgccacctaaagcaagtgagccagcatcacccatgaaaattttagccggcttatggttaaaaataaagaaggcaattaaaccaccaattacactcatacaaaaggccaaaacagcaaaattcttttgtttgaatgcgatataggcatatgtaccatatgctacaactgataaacctgttgctaaaccatcaagaccatcggacaagttaacagcatttgaaaaaccaaccagccaaaaaataataaatgccacaaataaaactaagctatggacaaccccagcaaaaggaatatataacccaaattgaaaatgatcacttgtagcaatcaagacaattaaaattgcaattataatctgtaatgctaatttttgccatgcacgcaagcctaaattacgtttgaagtaaagcttaataccatcatcaaggaaaccgataataccgtagcctaagagactgattaccaaaatccaaacaactttattcaagctgtgctgcatagcagctacccaaataacagaaataactgctgcaattacaaaaacggtcccacccattgtaggtgtgccagactttttttgatgccatttaggaccttcatcacgaatttcttgtccttcgtgatgtgaccgcataaatttaatcaacaatggaataaagatcactgtcaaaaccagtgaactaactagggcaatacaacttgccaacatcatattcattctgagttactcctttaacttaatgtttaattttcttccagcttttaattctgttcctttagccacgctttgactcgcaacagtgccggtaccttttatgcttaacttaatatctgtcaaactagcaaattggtgtaaatcactataagtccatcccgtcatatcaggacaaatgatttttcctgaagtattgacaaaaatcttagacccagactctaacttttcgccactcttaactccttgattgctaatccgatcaccgctaccaattttaaccaaattaagtcctaattgcttagtttgactttcagcttgtgcaacggttttagcttttaagtttggtacttttacagtagttgatacatcatcatttttagcaatcgaaatgattctctgcatcatcggtttgaaaattgaagccaaaatcttttcagctccgcctccaattaagtgtggttgcttaattgtcaaataaatacagtaacgtggtttacttgctggataaataccaacaacagagaaaatataattactatcaccctttagataacctccacctttagggttagcaatctgcgcagtccccgtcttaacagcaatatcggcgtttcccatcttataagcagaaccagttcctgattgcttattaagtacctttctcatgttagccacaattacttttctggttttagcactatatactggagtaccaacttttttaatctgatagccttgaattgtattgccatcagagtcagtaattttattaaccaactgtggctttaccatttgaccattattagccaaagaactataagcttgcatcatttgcattacattcacagtaacgccttgaccaaaagcagtaattgcttggtcaactggtgttttaaacgaaatcatccccggctgctcacctggaagactgactcccgtcttttcaccaattctgaacttcctcaagtacttcttccaagtcttagcacccatcttttgttctaacttaacaaaaccagtgttacttgaacgttcaaaagcttgagaaaatggaattgtgccccaacctgaagtcagccagtcatggatagtcgaaccagcaatattaacagaaccagaccggtaatactcattagggttgtaattgccactgttgactactgcagcgaatgacaaaatcttgaaaactgatcctggttcataagtatcttggaccaagatatcccgatacgacttagttaatcccttcatagtttgaggattaaaagtagggcgttgagaagttgccaaaattttcccagtcttcatgtcttcaactgtagcagtaattgatgttggtcggtaagttttctgtacttcacttaagcgagtctcaagcaaactctgcaactgagaatctagtgttaaatacaagttgtttccatttttagcaggcttataaacctgattactatttggaagctgatattcagatgcatctaccgaagaaatccggtaaccatctgtcccagtcaaagtcttattgaaataggcttcaattcccatagttccgactaagttttgtgcattagtctttttattccaaattggttgagccaatccaacagtatgtgatgcaaaaacaccattgggatacaatctagatggtgtttccaagaacttaattcctggtaatttcattgcttcaatctttttcttttgccgcaatgtcagtccactaccacctgtcccaaattgtacctgaaagaccttctttttgggggttaaatattggtaaattttttccgcagacaatggtaaaacctgtgccagcttttcagctgtcttggttttattcactacatactcaggtttattcttatagttgatcgaagtcttatctaaaatcgcataaaccgtatacaaatgcgaatcttccgcaattgttaatccatttcgatcatagatagtccctcgcgtggccttaattacctgattgcgcttataaagctgcttggtacgctgtgataaattttgaccattaactgtcttggatattccgatatataaaaatctagccgtaaatacaagaaaaaccaaagccacggccatttggagaaatctccccaccgtaaagcggtagccgtgggctttggatttttgtaattttaaattactgttttttttcattaacgaatcgtcctaatatttttgttaattagagttaatcctttttcacgtgcaattttatttaaacgtgaagtagaggtcaactccccaatctcttgacgtaaatcggtaatcttattctgttccttagcaactgtttgttgagttctagtcaattcatgttgagccgaagttgcagaaatactagaagaaactagaaagatcatcatgcccaacgtaatgacgcttccaataatcatcaaagctttttctatgccactataaggaactttacgcggatcaaggataattcgttgtcgtctttgcgaaccatttctactacttggttcatattcaatttttcttgctgagctatcagccataacattttcctctttataacttctctgcaacccgtagttttgcactgtgtgagcggttgttgttctctaactcagaagtagaggctacaattggtttgtgatttaccaaacgtagcgttggcttcataccgtccggtataaatggcattcctcttggcacctcaacttctgaatacttcttaaaaatccttttaacgatcttgtcttcatgagactgaaacgtaattacactgattcgaccacctggacgcaatatcttaattgcttcctctagcgaagcttgtaaaacatcaagttcgtgattaacagcgacccgcaaagcttgaaaactcttctttgccgggtgccctccagtccttcgtgcatacgcaggaatcgcatctttaatcacatcaactaattcaaaagttgttgcaattggcttttcccgtcgtctttctacgattctgtgagcaatttgacgagaaaacttttcatcgccatattgatacaaaatatctgccagttctttttgacttaaagtattaactaactgataagcatctaagtcctgactttgatccatcctcatatctaatcgcgcatcataacgatatgaaaaaccgcgatctgcttgatcaaattgaggggaagatacacctaggtcatagtaaatgccatctattccatctgagtaacccagttttaccaggtccttttccagattactaaagttgtcatgtaccaattctaaccttggctcactatccagttgtaataaattcgcaaagttcaacttcgccgattttatcgcatattcatcttggtcaaaacctacaagcgtaccggtgtcaattttgctgagcaaatatttagcatgtccaccaccgccaaaagttgcatctacataaagaccaccgttttttggtttcaaattgtcgatagtttcgtgtaagagtacactggtgtgtttgaatttcatattttttatagttcaatgtcgtccaaattttcagcaatatcatcatagtcttcgttagcttcttcttcaaaactagtccaacgttcttttgaccaaatttcaattcgatcagagacaccaatgatgacacattctttaatgagtttggcatgcattttcaacgttgttgtcagattaacgcgaccttgcttatcaaactcacattccatcgcaccagagtagaataaacgcataaatttacgtgtattcctcttagtcaacggaagttttgctaatttagcttcaatcttcgaccactcctccatcgagtagccaaaaatgcagccttccattcctcgcgtgaatatcatcttgtcgccaatctgatcgcgaagtttcgctggtataatcaggcgacccttgctatcaagattgtggtgatattcacccatgaacatggtctagcccccttccactaaataatttaccacaattccccactctctaccacattcataagaaaaaaatacagatttttaaatttcttttttattgtgatttttcaaaataaaaaaaagtcacaaaatattgaaattttgcgacttaagcatatacaagtaattttattttataacactagcatcaataaaagtccgatataccagaaaacagtacaggcagtcaaataatcccataattttctaactgtttttcctaaagaaatatttttatttctaatcgcatcgttcagcgacacaacaatcactaatacaaaatagcataaaaaaccataaggtaaaaaagaaggtttattcatatgtaaagtaattaatccacaagctgaaagaaagaaaaatggcataacatcgtaccctctaaactgtgctttagggaaaattttattgataaaaaaagcaactactaagccaataattggaattaggaaaatataaagcataagtattcctccattctttttattctaaactataattgatttgaaaaaaaccgttaataagcataaaatattgttcaaataggagggctgtttatggcacgaaaaaagaaaaagaaatcaggttttcaaaaattaactattgcaatggcttggatcatggcaattattactttagcagctgttattgctcaagctgctatctcacttcaaagtttttaaggattaaaaagacgcgaaagaaaaaatctcaatgtcattaagttaagacattgacaattaagggtgcttttttagagatcgaatcatttggattcgatctctttttttgtataaaataaaggcgaaaagaccagccttttcgcctatcttatatattatatattttaaaccttcaaaattattgccagaaagatggtgttaattatgaaagcccttcataagaatattctagaacgtcttgatcaaattatcaataatactggggatcatattcacgattttattaataatcctcatgcttttaccaggaaacgcactttagatgcagcgacagtccttaaaactacaattaacatgcaaggtcagaatttaaacagtgaactctttagagcttttggcgaagatgcaactaaaaagaacgataaagtagttagtacttctgcctatgttcaacgcaaaagccagctttctcctgcttgttttaaacatattctgactgtttttaatcaaaatctatttaatattcaactttttgatcatcactaccgtttgtttgccattgatggctctgactttaatcaaatctggaatccgaaatcgaataacattgtacaagcttcttctcataaaaagaaaccctattgtcaaattcacgttaatgccttatatgatctattgaataatacctaccaggattgtatttttcagcctaaatcagaaatggatgaacgcaaagcggctgttcaaatgcttaaagctttgaattgtggtccatatattgtaacaatggatcgtggctacactagtttcaatatgattgaaaactgcaatcgcctgcctaactgtcattacataatacgaactaaggctggacaaggcggagttaaagaaataacgacattgcctgatcaagaatgtgatcgtgagatttcctgcctggtaactacttctaactattactacatcacgcataaagccagtgagaatattcaccatgtccagcatcattatcgccaatatattaagtatcgctctaaaaatacccaggatctaagctgggattttggcgagttatgcacaataaaatttcgagcctgcaaatttagaattaatgatgccaaatcaggcaaagaagaatgggaagttgtgctaaccaatcttgatcgaaaaaattatccgctaaaaagaattaaagagctttatcatctgcgttggggtattgagacctccttcaagaaattgaagtattctttaggcagtgtacagttccattccaaacaagataaatttattgaaatggaaatttatgcccatatgattatgtttaatgcaatcagtcaaattgatgcacaggcctatattccgcaaaagcattgcaagtatcaatatgccatcaatttcaagcaatcatgcttgattattcagagcatgtatttggcttcttctttaacgcaagattttgaacggatccttattcagatcagctattataccattccaattagaccaggccgcaaggacaagagaaatattaagcccaaatcagctgtatattatttatatcgcgtagcttaaaaaagcagaatctgtgctatgccttatttgttgtacgaaaaaagcaccaatttaaccaattaaatgttaaatcagtgctttaaaagtctaatattaattgtcaatgtcttaacttaatgacattggaaaaaatcttccgcgtcttttttaaactcgataagcgtttaaatcaattaagaatggataatcctgagctaaattgccccaaatccaatacaagagaaaaaagaagacaactgcccaacctaaactgactaaaatgctcattaataatacgtgtgctgatgcagcactaatacccaccatattaaaaatgagccaactatacgcaacaaaaactgcagttcctaataaaacgacaattaatctagcccataacatttccggtaaaaaacgagctgttttttgacagatccagcaacttgcaggtaggaaaactgtataaacaccgataatgccataaaaatagatatcagcaacaattcctgcacctaatgctaaccaaatttcattatcattagtatcatcaaacagaccaatcaacattacactgattggcaaaatgacgcttgacgctgcaaagttgtcataagtcataaactgatgtaagtaaagtgcacatacaccgtctactaccaatgcaataaataagccaattgccaaaacccattttcgaaacgtagacattaattagccacctgtctttcaattacagttacaacagatggatcactaatatcacctgctggtttaattctaatctgatcagatagaccaaatgaatcacgagttgtcgtagtaactgtaccaattaacaagccttttggtgagttaccgcccataccactagtatatactctcgtgccggccttcagtttgcgaccatcaaccacctgtgtaaaggcaagataattattggaagtaactgtaataataccatgtactgtttttccattcgcagcatccgcttgaacagagaagcgattagccgactcatcagtagtagtaagtaattcaaccttggaagaagcagcatttgcttctacaattcgaccaataacaccgccatcgcacatgacagccatattctttttaattccagctgaacttcctttattaatcactaataaatctgaccatgtatcaggcgaccgagaaataacagaggcgttgaccatggtatagccacttaacgtatcttttaatttcaatgcagacttcaattgcctattttctttttcaagagctgaattgcgagccttcgtctggcctaaattagtaacttctcgctttagatgattgttttcttcttgcgtatttaaaatatcatgaacactatttaatccgcctgacacgagccctactggtacatcaacaattctagtacctaaagcaacgacatcgttacccaagctttgaatcagtaaaggtgtattgcgcctattgcgcaagctaacactcccacccaaaacggataaaataacaactactataataaatgctgataataactttttattttgcagaaattttttcattaagaattgatcctatagaaaaaccggcaacagccggcttttttattatttgcgacttctacgcattacttcaatattcttgagtgattcaccagtaccaattgctacacaatcaagtggatcttgagcaataaacacaggaaccttagttgcttcagaaataacttctggcaaattcttcaagagtgcaccaccaccggttaaaacaataccatgatcaataacatcggcagcaatttctggtgaagtttgttccaaagtctccttaatagctacgataatgtcttgaactacatcttgaatagccttggcaacatcaactgcttcaatatcaacagattttggtaaaccagttactaaatcacgaccacgaatattcattgattcaatttctttagccttttcaactgaagctgaaccaatttgaattttaatgtcttctgcagttctttcaccgattaataagttaaagtttgagtgaacatagttaacaatcgcattattaaacttatcaccggcttgacgaattgaagttgatgaaacgattccacctaatgaaattgtagcaacatcagtagtaccaccaccgatatcaacaaccattgaaccagtagggtccataactggaagaccagcaccgattgcagctgcaaatggttcttcaattacaaatgcttcacgagcacctgcaactctagctgcatcaattacggcacgcttttcaacttcagtaacacctgaaggaacacataccattactgaaggcttggaattaccaacagtcttttccataaaatatttaagcattgctgcagtagtatcgtaatcagcgattacaccgtccttcattggacgaatagctacaatgctgcctggtgttctaccaatcatttcttttgcttctgaaccaacggcgattacttcgcctgtttgtgtattctttgctactactgaaggttctctaagaacaatgcccttaccttccatataaacaagtgtattggctgtacctaaatcgataccaatattctttgtacctaatccaaacacaaaaatctctccttaactgttgcggtctctaaatcttgactaattatagcatactataactttaaaggcgcctttcacacaaattttaaagaactttaaaacaatttttctcacgcaaacttaaatattgaccttctcccacgataaaatggtctaagaaatcaattttcatcatttttgcagcttgacgtaaactttcagttaattccaagtcacttgcagatggcgttaatttaccactaggatgattatgagcaataaaaattccagagcagccataaataactgcccaccgaaaaatttcccgcggatgagcaattgatctattcaaagtcccttgaaatagtttcttctcagcaataatgtggttgctattgtcaatatacaatgcccacaattcttcctgcttgtgtcctatcagcttatcagctaaatacgtacctacttcaatgctagatgtcaaaattgtctttctcttaggtgaagcgcagcgcaaacgatctagtactgcctcagccgtaatagcaagttcatccgagcattctgaactggtaataaactttaatagatcattaaacgaatttaaccctgtgtttttcagaaaaacatttaagtcctgcaacgtatgaattcctttattttctagttgttcaaataattgtgtcaatagctctaaatctgttttgacaaagtaatgatttggttttctttttaacataaaatccccctcattacttattacgcaaaaaagagctaaatttttttcagaaattcaaaaaagttttgacaaatcatcgttgcattctgcttatctttaacagatggtgctttcaaatctggtaccatcacacattttaaccctgcattagcagctgcttgaacaccggttgatgaatcttcaaaaactaaaatattttctttaggtaaattcattttcttagctgcttctagataaatatctggtgccggcttagccttaatgtgacctctttgtacatcaagataactaagatgaaaatcaaaataatttctgattccagtcacccacatagcatgctgaactacattttcataattacttgaagcaatcgccatcttcaagccacgcttttcaaattcgtctaatgcttcttgaacaccaggttgcagctttaactttccctcatcagtccattgccacaccaagtcatcagttcgcttaataaaacgatcacggtctgcttcagttttaaaatatttatgataaaaatcctgcatctctttaactgtagcaccagttaacttgagataagcatcccgcggcgtgcccaaattctcttcttctgccgcctgaatattagcatcccaatacagcttctctgaattaactagcaaaccgtccatatcaaagataatgccttgaatatcatcatctagcccttgtacgcgcatcacgttttcctttccaatttaaaatagcactaaccaaataaaaggatccactaacaattaaaatatcattagctcccaagtgatctcgcagctgggtaaaagcagctcgataatctttttcataattatatcttttttgtacatcaattggaaaatcatcttttttagctactcgcggataagataaagttgtcagtaaaacttcatctttatcatcaaacaagctaaacacctgctcaagatccttatctttcatcatagtcactaaagcataaagcttgccatgcttttgctgggtcatacgatgaacgactgccagcaaattactcattgcctgaatattatgtgctccatctaaaatgattagcggattttctcgtaaaatttgatagcgccctggaataatcgtttgattaatcgctgtttcaacttcttcatttgataaaggcagtttcaacaaaaagaacgcctggcaggcaacggcaatatcataggcttcaacttgtggtcgtaaagcaaaaactagctttcttttgtgatcttgataaacaatttgattatcaagcaaaacactaaagtctcgtcctaattgataaactatcgcatgttcttcttcggctttacttttcaaaattggccaaacaacttctggcacgttacctaaaactactggtctttttgccttaataatgccgcttttctcacgtgcaatatcctgaattgtaggtccaataattttttcatgatcgagaccaattgtagtaataacacttacttctggcataattacattagtcttgtcatgttctccaccaattcctacctcgataacagcataatcacactttttttgagcaaaatagacgaaagccagtgcgacttcatattcaaaggttactaacgaaaaagttgagtcctgctgctgcaatttctcataagtaccctgcacaatattagctgttttaactaaatcctgatcactaatattttgattatttaactgtattctctcattaaattcatagacatacggtgagacaaaaaggccagtcttttgaccagccttttttagtaggtttgataaatagtatgaagttgaacctttaccattagtgcccgtaatgtgaatcgttttaactagatcttgaggattgcctaattccaacaataaccgcttaataaaagacaaattatttttaggatgtaaatgaggcaaagcatataagtaatcgattacttcttgagctttagtaaatttcaattatttactctctttcaaatcttgaattctttcacgaacaccggctaattgactttcgtagtcagccttcttttccttttccttgttgacaacagcttctggagcgtgaccaacaaagcctttgttagccagcttcttttcacaacgagcaacttcgtcttcaagacgcttttcttctttttccatcttttctagctcatcgtcaacattaacaagttcagttaatggaacaaaaatttgtgcgcctggaattacagcagtcttagctaattttggtgcttcaacttcactagctacagtcaattcctttggatgtaagaagttttcaacgtaatcagcattttcgtccaaaacgcgcttgttagcttcatcgtctaattgaatcatgatgtcgatttgacttgacattggtgcattaacttccatgcggatgttacgtactgctttaatagtttcaattaagaaggccatgtcttgatctgcttgcttgttttcaaattccttgtgagtagttggatattcagcaaccataactgacttaccttcatgtggcattgaaagccataatttttcagttacaaatggcataattgggtgaagcaaacgcaagatttggtcaagaatccaaattaagttttcttgctttcttgcctttaattcttcatcgtcaccattcaaagcaaccttagaaatttcaatataccagtcacagaagtcattccaaataaagttgtaagcttcacgaccagcttcaccgaattgatattcatcaaacaagcgagttacttcactaacagtatgattcaagcgatcgaaaatccaacgatctgataaatcaaatttagaagcatctggcatatgagctggtttagcatctgctggcaagttcatgattacaaaacgacttgcattccaaatcttgttaatgaagttccaagcagcagataatttcttaggatcataacgagtatcttgaccaggagcagtaccattaagcaagaaccaacgaagggcgtcggcaccgtatttatcaactacatccattgggtcaacaccgttaccaagtgatttactcatcttgcgaccttgttcatcacgcattaaaccgtgtaaaacaacatcattaaatggacgcttgccagtaaagtgcaaactttggaacatcattcttgatacccagaagaagataatatcgtaaccagttaccaaggcattagttgggaagtagcgcttaaagtcttccgcattagtatcaggccaacctaaagttgaaaatggccataatgcacttgagaaccaagtgtcaagtacgtctggatcttgttcccagttttcaatgtccttaggtgtttcttcacctacataagtttcaccagttttcttattgtaccaagctggaattcggtgcccccaccacaattgacgtgaaatacaccagtcgtgaacatcttccatccagtgatcaagagtttgttcaaatcgttctggaacaaagtttactttgccatcagtcttttgattttccaaaactttgtcagcaagtggcttcatcttaacaaaccattgcttagaaagacgtggttcaacttgaacgccagaacgttctgagtgacctactgagtgaacaattggttctatcttaatcaagtaaccttcttctttaagatccttaactaaggcttcacggcattcaaaacgatccataccagcatacttgccagcttcttcgttcatcgtaccatcatcgttcataacattgattctttcaagattatgacggttaccgacttggaagtcgttagggtcgtgagctggagtaatcttaactaaaccagttccgaattctggatcaacgtgttggtcttcgataattggaatgtgacgaccaacaagtggcaagatcaattctttgccaacaatatccttgtagcgcttatcaccaggtgctaccgcaacggcagtatcaccaaacatcgtttcaggacgagtagtagcaatttctacataacctgaaccatctgcaaatggatacttaatatggtaaaaggcacccttatcatctttgtgaataacttcgatatcacttaaagcggtttgaagtgctggatcccagttgatgatgtattcaccacgataaattaagccttcattgtaaagctgaacaaaaacctttttaacagctttagaaagacccttgtctaaagtaaatctctctcttgaataatcaagtgaaagccccatcttagcccattgacctttgatgattgatgcgtattcatctttccaatcccaaacctgtttaacaaaagcttcacgtcccatttggtgacggtctttgccttgtttacgcaattttgcttcgaccttagcttgggtagcaataccagcatggtccataccaggaaggtaaagagtatcatagccttgcatccgcttaaaacgaattaaagtatcttgaattgcagtatcccaagcgtgacccaagtgcaacttaccagttacatttggtggtggaataacaattgaatatgggtgagcttttttgttacctgatggcttaaataaatcttcatcaagccaggtttgatatctacctttttcaacctcgtttgggttgtatttaggtgctaaatctgtcataaaattcctccaataaaaaagtcctagacatattgtctaggacgatcagttaaaccgcggtaccacctacgttaagcatgtatcaaacatgcttctcttgaagacgataacggcgtataccggattaacctactttttattttcaattaatcagctaatcaagctactagtcaaccttcggcctctcagctgtctggcttttctctgttaataaagtcgacccctcttgattcttgctttggttatgattatagcatgaacttcactcagaaaaaagggttaggaattagtcgtaattaagttagccatatgtctttattcttttaataaatcagcaatacatttttccgatgaatgatattgcttatattgttttaacacgttgattaaatcatcatagtgactattccaaaaataataattttcatcataagatttcacactcttaagatcgttataatactgcttaacaaaatcactaggcttcactttacttttatagttatttgtatatcgctgatagtcttgatgataaagaatgtctagaatttcaatctcaggtctagtacgaagttctactacttcggatactttctttttatacacttctggaagattaaacttttcggttttggaatcaagtatcctataaattttaacctttctacttctaaaccctttattcaaaaattctttagcaaactttttagcatttcgtgctctaattacttcaccttcaagaagatcatcctcgttgaattttagtgcatcgtgttccaatagaacttccataattgctcgttcagtatgaccttctacaataatagcgattagatctgtagagttactcatccattttaaccgccttttctgtagccttctttaaagccatgtaggcatcataatctggagctgtcccacctaaataatctgattcaaaaacatcggctttatttagatcgcttcttacatcagcagttgaatatctttgaagctgaatcttgccttctctcttagtaatatattcttcatcagttctttcaattttatccaaaatttcagtatagtgcgtactaaataccaaagtagctctatttatgttgattttaggattagtaaaatactcaataaaagaatctacaatagcgtgattaaagtgattctccaactcatcaataaagatgatgccaccaacggaaagtgcattaattacctcgccataaagagttatccctttagctgtaccagaagacaagtattttgcaatcgttgtaaaatcattttctgcaatctctgtatctttccctttaaacttcagcttaaacaattgtttagtagcaccagagccctcaggcttgttttcaattttaagatattcaattgttggatctaaaaagtttaaaatttctccaggcacattgccagaaccatacatcaatgcattaaagtcagtaaagaacaaagtatcaaatggtatttgaggataatacttatttttcgaaataatcgctctaaaaatcgaatcatcagacgacaaaattgaagaagctaggtcgcctaattcttttctgtctaattctggttttatatttttgaaatcaaataattttttctttgaaagattaacagttaccttttttcgatataccgtttcagactcaatatgccagcttttacttaaagttttctttaacttgaaaactaaactatccttataaactacatgatcagttccataaaaataagttgtaacactaataggctcatttcctattagcacatccgttagcttagtttgatcaattgacttttccatcacaactgtttgaagaattcctatcaagagtttcatgatcgtagtctttccagtagcattagtccctactagagtgattaaattattcacccataaactgccgagcaaatgagttaatcgatcagaggtattagaagtaacccttgcatcactgaccagtgaaaattcaagatcatcctcaaatagcggatgattttgaatttctaattttaaaaagtataatttatttttattcataattattcacctaaaattgttttattcaggctaaattttatcatatttttgcattttatacataaaatctgtttaaaatataaataatcctcatcaagtagttactacttcatgaggattatctaaaatattctactttctaatcatcttaactgcttgaatcaaaatcgttggaatcagagccaagccagcaagccacattacttcttgcccagttaacggagtaactgcaaacaagctatgtaacgccggtacaaacaaaatcaaggctaacaaaattgttccgacagcaaatgctgctaaactgtaccagttatttttgaaaccgatcttgaagatactgtgttgtgaacgacaattgaagccatgtaaaagccgagcaaatgtcaatgttgagaacgccatcgtcgttgcaactgcaggactatcttttagtccgatcaaaaaggcagcaattacactaatcgaaatcaacaaaccttgaatagtaatttgactcacaaaggctttgtccaaaataccagccttaggatcacgtggcttacgtttcaaaatatctggatcacctggctccattccaattgctaaagctggaagcgaatcagttaccaagttaataaagagcaattgaaccgctacaaatggtactggtaagccagcgagtgaagcaaataaaacagtgataattgctgaaaggttacctgataacaagtagccaatagcgtttttaatattttcataaactgttctaccgttagcaacagctttgataattgtggcaaaattatcatcggccaaaatcatgctggcagcatctttagatacttcagtaccagtaatccccatcgcgacaccaacatcggccttcttcaaggctggtgcatcgttaacaccgtcaccgatcattgatacgatacgatcttttctctgccatgcattaacaattctgatcttgttttcaggcgatacacgagcataaaccgaaatcttctcaatgttttgatcaagttcttcatcgctcaaagcatctaattcaaggccagttaaagccatgtcaccttcattgaaaataccaattttcttagcaattgcaacggcagtcaccttatggtcaccagtaatcatcacagtcctaatcccggcttccttagcacgagcaactgcagctacactttcttcacgtggtggatccatttctgaaacaaggccaataaaagttaagccatcttctgcttcagtagaaagctcttcatcactttctttataagcaaaagccaaaacacgcaaaccattttctgaaaagtaattgttttgtgccaaaatttctttacgatcttcttcagtcattggacgaatttcatcgccgaaacgaatattgacacagcgtttcaagagcacatcaattgcacctttaacaaaaatagttggtacagtatgaatcaaatgcttagtactcatcagcttacgatctgagtcaaatggtacttcttccagacgcttagaatgttcgcgtaattcttgttctgataagcctaaaacaccattacctaagtcaattccgggcacttgacgatacatttccagcaaggctgactcagtcggatcaccaattgccttatcttcggccaaacttgcatcgttgttaagcactacatcataaagcaagtagcggtgaagttgattactcaaatccagctcatttggctttaaaactttaccaccaatatagatgtcctcaacagtcatcttattttgagttaacgtaccagtcttatctgaacaaattactgatacagaccctaaagattctacggctgccaagtttttaataatagcattttctttagccattttttgcgtacccattgcttgcacaatagttacgatagaactcaaagcttcaggaattgcagcaacagctaaagctactgcaaatagcagtgaatcaagcagcggttgaccacgccacatttgaataccaaagatcacagcacacaagattaaaatagcagtagccaatcgtgatgaaaactggtcaagtgatacttgcagcggagtgcgacgttccttagtttcattcatcaaggaagcaatcttaccaatttcagtctgcatccccgttgccgttaccacaaccgtagcacgcccataagttactaaggaactggagtaaaccatgttaacccgatcagctagcggcacttctttttcaaaatcagtgtccaacttgtcaacattagtcgattcaccagttaatgaactttcgttgacttgcagagaataattttctaaaattcgaccatctgcagtaactaagtcacctgcttctaacaaaagaatgtcgccaggtaccaagtccttggcctcaatctccattttttggccattacgcaaaactttagccgttggcgcagataatgactttagcgattctagcgacttttccgccttaacatgttgtaccgtacccaaaatcgcattcagaatcaatacaacaataattaccaacgtactttccagactgcccgtaaaagcagaaattattgccgcgataattaggatgatcaccattaagtctttaaattgttctaaaaagacctgaaaagtaattttcttctttccttcaactaaagcatttggaccaacttgagctaatttctcttgagcctctttagcgctcagcccctgctttaaatcggtatttaactctttagctatctcgtcttttttctgacgatagtattccatgtaaagccctccctaaacataagagtaatttaagcaaaaaaatagagactactggctaaaacactgtttagtcaatagtctcatcatttaaacttacagcggaaaataaatttcgttctgacgccgtaaatacaatttatgccgattactccctatttacttgtacataattaaaccatatcaagtaggtagttggcaagctattttaactttcttttaggaagttttctaattgttcatcggtaaaatcagaaccgtaattttgttcaaggagatgcatgatctcttgcttggtattaccagttcttttaagtgaagaaactaaaattttgacgcctcgtttaagtccctcttctttaccttcctcacgtgcgtcttgttctcgctccagtattttctcttcgtagtccatgatataatcactccattccgagcaataagataatcatttgtacttcttatctttcaataatccgttagcaatatcagccgaactaactggtacaccgactaaacgctcatttttccacaaatcaaaaaaatcagctggcatcatttgatcaaattcatcatctgaattcattaaatccttataaacacgtgacttctcaaataaatttagagcctgcttaggataaatgtttaatctcttagcaattaagtcgctaattgcttcagctagttgctgatgaaattgcttttcactaatttcgggaatcatctaaccaactccttatctatgaacgttaaagctttgagagctctttctgtcttgaaacaatactgctccgaataaacactcggttttaattttagcagagcctcatctaaatctagattaccatgtttccagcaattaacaacagaaaaaagtttaccatctgctgttgggccaatgacgatatcagaattatcttttatattattcattctattttgaatgacaaacttaatccaatcaatatctgcttggtaaactaatattttcaagtcgggttgatcagcatcgaatacatatctatttaatgtcggttgacctgaatatctagccttacgctttgcccatttttctgcttgtctacgattagcagtcacataaaagccattaccaaaatcagttgtaaaaacatttttatttatacgaggctgataaacagcctgattgcttccatgatacaaaatgactttggtattgcttttcatgaatcgtgatgtatgcgtatttttcatcgcgcacctctttcataaatagtaggacaaaattatcctccactatttattacgcaaaaaagcacgatttttttgtgagaaattaaaataaaaaaagaaaatgcctgagaattatatcccagacattcaccaatttacggctctttctcatttctcttccttcacaatataaattggtcgttctttaacttgtaaatagattttaccaatataacggccaataattccgatacacaaaagctgcaaaccgccaatcaataaaataattgaaattgtgctggcccagcccaaaatacttgaaccaggaactattagtttacgaacaattacaaaaataagaccaataattgacaaaatgaatgaagttatcccaatccaaacagctaagttaagcggtgcttgagaaaaatcagcaatcccgcccaacgcatatttgaataatttgtgagtcgtccaatcagtttcaccagctacgcgctcgacattgtggtactcaagatacttagtcttaaaaccaacccaagcaaaaatacctttagaaaagcggctgtattctttcattgataaaactgcgttaaccatctgcctggtcatcatgcgatagtcgcgtacgcctgaaacaatttccactttagaaatgcgattaatcaccttataaaattgattgctcaagaaagacttaaacttaccttcccctttacgatctactcgtctgcagccaactgcatcatagtcaccagtctgcaaaattttatacatttttggtaaaagtgaaggcggatcttgcaaatctacatccattaagacaatataatctcccgttgcagctgataggcccgcatagatagcggattccttaccaaagttacgagaaaaagaaatatagtgaacatgtttgtcctgctcatgcaattttttcaattcggtcagtgtgttatcattggagccatcatctacaaaccaatattcgggcgtcactttgggcattttagctaatactttttgcactgctggataaaaaagtggaattgtttcttgttcattaaaacaaggaaccacaattgataatttttccattagatttcttctttcttagcttttctaaaagtaactactttattaattacaaattgaattaaagttgctacaaaagttgctactattttaacgattaagtgcggataacccaatttagtaacgaaaataaatagggaaaccgtagtaaataccgtggtaatctgaccaacgataaaataagaaataaatcttaatatcatgcgatcatgaactttaaagttagtataagaattccataaaaagttattgatgatcccgcaggtagacgaaataatgttagctatttcaacattcatcttgaaatgcgtcaaaattgtataaattccaaaatcaacgactagccctaatacgccaattagaacatactttactaattgaacaaaatcttctgaatagattgctgttttgattttttccataattattcctaataaaaaatccagacaagaggtcctggatttcaacatatttaactaatatggtcttaattatatcattgtttttaagctctacgttttcattattaaagttaaaactttaataggaacaccttttgcattaattataatttttgtcattcaatctatctgtcttgttagtatcctcatacaaatgataggaactcttaatcttatgcctgccttgtggatcaaacatgcagagaaagataacatagcaacactttaaattttgatatgtgctgcatttcaaaatcatacagatttccatcaacatcctcaaccaaaatatcgagaataacagctttttgcttagggtgtttgggatcagcgacctttctctgcttctgcagataatgaatatctctaatctcaatctccggcaccagtccctgtaggacatgcttgcaaaaattcttgttagacataatctcaccaaagattacatcctctgtgaagccaaaccagggcttctttttcttgtgcgtattttccattgcgcacctctttcataaatagtaggacagaattatcttccactatttattacgcaaaaaagtgcaatttttttgtgagaaattgaagttttttaaagttttacccaactatatcttccaacttcaattccagatattctccccgctttaagttagcaggcaagcttaactttcccatcgaaattcgctctagctcaacgactttcatccctaccgcaccaaacatacgcttgatctggtgatatttaccttcacaaattttaatttcagttgtagacctatcgtgctcttcatcctgggataatatcttcaattctgctggctgcagtttggtcccatcgcctagtgtcattcctgaagcaaaagttttaacagttgcatcattagctacaccagcaatttcagcacgataaactttatcaacatgcttaccaggtgcaagcaattcatgattcaactgaccatcattcgtcaaaaggagcaagccagtagtatccttgtccaaacggccaactggcacgattccttgataacggtcctgcggtgcaagcaaggaaatcaccgttggctgattgcgatcttccgtcgctgacaaaacacctttaggtttattcaataagaaataatgatatttttgataagcaacagcatctccgttaacggtaacctgatcgctttctttaacttgctgctttggcgttttaacaatcacatcattaaccgcaacaattccttttttaattaattggtgtacttcttttcgtgagccaacattcatattggccaaatatttatctatgcgcattatgtctttctttcgttcttatgtgttgattaatattaattatataagaaagttaacccaatttcgaattgcgacactaatcaaaaacggtcgattttgttttcgaccgtttttacgcgcgttttgcgcgcgattatttgcttaaaatatattttgtagctctgccttcacccattcttctaatataaccttgtttttctagttgccgcaaaatcttcaaaactttcgtcctaccaaacttactcatttggctaatttgcttcgtagtatccgcaccttcatgaattatttgatatactttcttttcatcattagacagatcgtccgtaataaattttaaaactggcaatattatctttatcgaattatcaaaaatttcaaactgcggttgaaccaaactacttctataagaatcatttattcttcttacacctgtaccaaattgctcaattaatcctaacctaaagaaaacattagcaataattggattacgcaaaatggaaatctgacctgaaagatattcttctttgctaagtccttgtggcaatccacctggagatactacttcaattctgtcatcatacatagaaattttaatttgcgaattaatgttccaaactcgatgaactaaggcattggctattgcctcacgaaaagcttcttctggaatctgacttacaatatttcgcgttgctccctgtatttcttcatgttgataatattgacgatatttttgaattgcttgcttatactctttaagaatagattcatgctcataacttgctcgatcaagcataatattaatgctttcaccaaaccgaacaatatcaattccacgataattatttttgtctgccaaaagctcaccggcattagtgtaactagtatccttacgctctaaattaagcgtaatcaatatatcagatgttaaacttttaattcctatcttttcttttaatgcttcttctaaaatgttaaatgacaaattttggttcatcgcggttaaactatcataggttctattttcaccaattaagattaactgtgataattcagatcggtccacttcgatcgaagcactgtcattactcttataggcctttgatttgtataaatatggaggattaactccttgctttactgttaaagtaaccacattagttttaggatcaatttctaaattataatctggatttggtttgatcgaatcgttgattttattttcaacatttaaacaaaattcaactggatttttcacaccaacgattgatccatcatcctttattccaaatttaattttgccactgccataatttgcaaatgcactaaccgtttttagaaaagtattcgtcaatttctctttaaattctaaatttttggtttctctcatttaggtcaccgtttctaaactatttagttataattatactctttcacgcgcaaaaaaacggtcgaaaacgaaatcgaccgtttttacgcgcgttttgcgcgtgcctattatattaactttaaatcaatacataatactactagaagtttccatattaacaccatatctttctaaataattaaactgtatcatattaaatttcaaaaacaccagtgaaattaatcctctataacaagtcagcgtcttcttgagctttatcatccaagaatttttcatttggataaattggcgtaatctcaataccagccattgccctttcaatcaggccttcaacgtcaagacgagcttcatattcacgcgctttttccaactttggcttagtcttaggacgcggtggagcaaaaattgtacaacaatcttcaaaaggttgaattgataaatcaaaggtaccaatctcttcagctttggcaataatctccgttttatccattgttgcaactgggcgaataaccggagtagtagttacatcattgatagccaccattgattgcaaagtttgagaagcaacttgaccaactgactcaccattaaagatagccaagccgccacgttgtgcacgaatgcggtcagcaagctgcaacataaaacgacgttgcacagtcatcaaatagccttctggcagtttttccttgatcgtttcttgaatttcagcaaacggtacggcaataaaattaatcttaccagcgtagtttgccaaaataccagtcaattccttagccttagccaatgccttttcagtagtgtaaggtggactaaagaagtgaaccatttcaatatctactccgcgcttcaatgccagccatgaagcaactggggaatcaatcccaccactaagcatcatcacagccttaccagcagtaccaacgggcatcccgccaacaccatggagcaactgattagaaatataaacggcatcttgacgaacttcgattctcaagaccaaatcaggatgcttcatttcagccttcaagccatccatatgatcaaacaagtagtcaccaactagattattcaattgattagtgtcgtattcaaacttgtggtcactacgcttggtattaaccttaaaagtcattcctggcttaaaagtctcttgcatcaattccaaagaagtcttttcaatatcttcaagagtcttaggaatcttaattgctggtgagtaagtttgaattccaaataccttcttcagacgttggtcaacatccttgaatgatgcgccattcaggacaatgtgcatccgatcatgacgaggatgaaattcaatttgtgggaaatccttaagaactttttcaacgttacttgctaagcgattgatgaagtcctttctgttcttccccttagttgaaagctcgccatagcgaaccataacttctgtgtattccattaattttctcccaaatgattaattttagcaaaatgattatagatcttgtcaaagaccttaataaattcatccgcttcttgaagcgtattcgtctcatcaaaacttaaacgaattgcactagtagcaatcttatcatcaattcgcatagaaaccaaggtgctagcctcatctgccgtctttgatgcacaagcagaagtagttgaagtataaatatcttgatcttctagcgtatgaaccaaagtttcgccccgaattccctctaaagcaaagcaaagaatatgtggtgcaaagccatcgcttactggtgaaaaaatattaatccctggtttatcttttagataatcaacaattttagccttaatttctgcttcacgcttggccttttctggttcatcttctaaaagcaaacgaattgccttagccattcccgcaattgcaggcaagttctcagtacctgaacgcaagcccttttcttgaccaccaccatcgtgtaatggggtcagcatcttgccttcttttttatataaaatacctataccacgtggtgcatggaacttatgcgcagataagctcgagaggtctactcttggtgtaaaaaccttatcccaaatatttttgccaagtgcctgaacgttatcaacatggaactgaatcgttggataattttcaagcaaatcgctaatctcatcaattggttgaatggtgccaatttcgttattaacgcccatgattgaaaccaaagttgtatcagaatcaatcgcgtttcttaagtcattaacgttaactcggccttccttatcaactggcaatctggtaacgcgccaatccaaattctctaacgcgttaaaactattggctacagatgcatgttccacgctagaagtgataatatgcttaccaaattcacgcttttgaattgcagtccccttaattgcggcattatttgattctgttccaccagaagtgaagaaaatttcatgctgcttagtccccagcaaatcagcaatttgtttacgtgacgcctcaagcaattggtgtgcacgatcacccatcttatgcaaactcgaaggattgccccaaatattagtcgctactttattgtaagtatccaatacttgtggatctatcttcgttgttgcactattatcaaaataaatcactatcattaccccttcatttaaaaaacggtcaatcgcttgaccgtttcaagacttttcaattttagcttaaataatgaatcgcttcaattaattactcttctcttctgaataatatgcattttcaagtcgttgataactacctggctctaccttttcaattgctgtagcaattgtatcaagggcttccttatagttatattcattatatagctgcattgctgtcttttgtgcttgcgcaattgaatccttatctgcatatttatttgaatactgcatcgtcaattcaactaggttagcggaattaatgatgtcatctgcttcacgtttaagccgctccacatcatcagaaatttgaattaattcagctgagatcttttccatattaatccggacctgacttaattcgttgctgacatgaccaatctcgttgactaccaaagtgtacatttggacaaagctatcaggattgccaggcaaatttcgtctttcaagtcgacgataaactaatgaaacttcttgcttaaagcgcttgattgaatcattagctacattttcagaatcataaagtccatcaacgtcagttgacatcttagcctgctctgcatcaatttcacgcaggcgatctagcatctggagccatgaatcttgaatagcagagtaaacacccttaccatctgcgatattctgtgtatcaatagtgtactgatggtacatttcattgacttctttttctaagtctttactcttttccaattcgccatgagtcaattcatagctctcatcaatatgccgcaacttttctaccagtttctttgacgcggtttgctgatgtgagatcaaagtcagcattttactttgatttttttcaacaaatggtcttgccttgtattccttagctaaaacatcatacaggtcgtcaatttcgccagagatctttttattttccttggctaattcatccaccttagtctcagctagcaatttgcgcgcaccatcaatttcatcatgaatttccttgattctgcccaaaacatctacgctagtaaggtaatatttttctgaaatcatttttttataagcatcagacaattccttaagctgatcttggaacactacttcaagctgatgataaccctcttttagcggttttaagcgtttttgtaagttacccaaagacatccgaatcttggacaaaactcgcttagcttcaacatgatcaccttgtgaagaaagattttttgcttcttcaaagtcactctccattgatgctagttgatcttcaacctgatcaatcgcagcaccatattcaaaggaattggctaagatatcttttcttaattcacgataaactttaatcaaagcatcatattgaatttgattttccttatttgattcaagtagttccgtgaaaactgccttggtgttacgagcatcttcgagcgttggcttgataatctcctgtgcttgtttaatattctttcttgctttaaacaagcgataagttgcattttcattagcagcttcttcaactagcttatgcactcgcggtaattttttcttagctgcttcagtgtagctcttgcgccaagtatttaatgtagttaaactttcgccggccaaatccattttatccagtcgcgtaatatcatcttctagatgcatcttctcaatttcagtcactgctgcatcaatcgcttcaatttcttttagttgtttacgattgatcattagcattgctgcaactacgacaatgattaggatcaccacggcaataattataatagcttgaattgatgacatagtttatcctccaaaactatcataattataacaaaacctgaccctaataggtgcaaaaagctgttctattttcttgatttattattctgaactctatataatactattcgtgtaaaatatttgcagcaataagtgacaagaacgtcaacatcttgaaacgctttagtgaacgagtaacccgcgctgcattgggcgaaaatgtaaatccaagatgcacgaatgttgaacttatgcttaatattttactccaaaaattattgtttaaattttatggaggattttttatgtcaagatatacaggtccaagttggaaacgttcaagaagattgggtatttccctttcaggtactggtaaggaaatttctcgtcgtaactacgctccaggtcaacacggtcctaacaaccgcggtcgtttgtcagaatacggtcaacaattgcacgaaaagcaaaagttacgttggatgtacggcttaaacgaacgtcaatttagaactttgttcacccgcgctggtaagattcgtgaaggtcaacacggcgttaacttcatgattttacttgaacgtcgtttggacagtcttgtttaccgtcttggtttagctactactagagaacaagctagacaattggtaaaccacggtcacattactgttgatggcaagcgtgttgacattccttcatacgaagtcaaggttggccaaactattggcttgaaggaaaagtcaaagaacttacaacaagttaaggatgccttagaagcagttactgctcgtccatcatttgtttcatttgatgaaaacaaaatggaaggtactcttgtacgtttaccagaacgtgacgaaatggaaccagaaattgatgaagccttagttgttgaatggtacaacaagttactttaatttttacattttattttgtcgaaagtctttctcaatcgagaaaggcttttttctttgctacaataagtacataaaaagaaaggatgattagatgactgaagatttaaataaacgtgttgaacaagcagctcaaggtattactccacaaactaagcctgatgaacgccgcagatttttaggttcattacgtgagcgctgcttaatccgtatggacaatactgaagttaaaaatcctgaattaactgccctatttcttaaacatatcactgactttaagggctatactattttgatcaatggcaatatcactgatgatggcttcttgggagacattgaagccagttgcagcaaatatgatattcccttcactttagttaacaatgaaaccgcaaaaacaggaccacatgatacggcagtactagttgtagcgaaaaacgctatcaatcgaccacgaattgagctaaagcaagtttatccacctgagtttcctaaagaagaattagccgcacctaaaacaaaagaaagtttttggcataaactttttcacggagataagtaaatgaaaccattagcatatcgtatgcgaccaactaatttagacgaagttgttggtcaaaggcatctgattggtccaggcaaaattattcgccgaatggtggaagctagacttctgtcttcaatgatcctttacggccctcctggcatcggtaagacaagtattgctagtgctattgcaggctcaactaaatatgcctttagaaagctcaatgcagctactgacggcaaaaagcaattgcaacaagtagccgaagaaggcaaaatgagtgggacagttgtcttattgctggacgaaattcatcgtttggacaaaactaagcaggacttcttactgcctttgctagaatcgggacaaatcattttaattggggcaactactgagaacccttatatttcgatctcccctgctattcgttcacgttgccaaatttttgaattaaagcctctttctacagatgatgcttctcatgcaatcaatcgcgcattgaacgataaagaaaaaggtctaggcaaatataatgttgaattaacagatgatgcgcgtgctcttttgattgaaaaaggcaacggtgatttgcggtctactttgaatagtttagaattagctgttctttcaactaagcaagaattgcaagataaacaccaagatgatcaaaaaattatcatcactcaaaaagaaatggctgattcaattcaaatgaaggtgcaaaactttgatgcttctggtgatggacattacgatctagtctcagcatttcaaaaatcaattcgtggctctgatacagatgcagcgctgcactatcttgcccgattaattgaatctggtgacttagtctctatctgtcgaagactagcagtaattgcctacgaagatattggactagccgatccagacgcagctgaacacgctatagtagccatccaagctgcacaaatggttggcttgcctgaagcacgaattccactggctaatgcggttattgagttagctctttctgccaaaagcaatagtgccatttcagcaattgatgctgcactagctgatattcgaaccaaaaaagttgactcaattcccgccaacctaaaagatgctcattactctggtgccaaaaagcttggacatggcgtgaactacctttatcctcatgattatcaaaatgattgggtagcacaacaatacttgcctaataacctgcttcatgccagctactttgcacctaaaggcaattctaaaatcgaagctagatataaggcaacctatcaaaaattaaaacaaatgcagtctgataacttgcgcaataatcactaatctcgcgcattcaatatggttgacaagcacctgtaatatgcgtattataataagtgatctgagttgatcgacaagcttaaatgtataaagttgaccgatcaaactataagacgtgggagttggcaaataactaccgaatcggaatactgccttgttgcaggatccatattcgctgcgatgccagctaaaattttgaacattgcgggttcaacaagcgtcattatgctatgtttagtcaactcggatttctttagaatattaaaaaaggcggtctcaattgaccgtctttttctatagtggagactgttaaatggcaataaagattgtaatgattatttttatccttctcctactgttaacctcgtggtacatgtggcacagaaggaacggacattttttaatttatgacattggtggcgatccacgcttgagcaatattcttaagtggacttcagtcgcccttttagctgaaagtattttagggattattttgctattcatgggtaataaatatttaaatctaatcaccttattcttagcttcattaactattttggcttttggtttatcaattactcaaaataaagaataataattcactaatgacaagcaaaattttggtaaaatagaatatagaaagaggtgcttatatatgctttcacaatacaagaatattcaagttgcagttgatggttcaaaagaagctgacttggccttcagcaaggctgtagccatcgccaagcgtaaccatgcaacactagaaatcttacacgtaattgatactcgttctttccaaaatgtttcaagttttgattcagcaatggtagaacaagtttctaaagatgctgaaaagagaatgaaggattaccaagctcgtgccactaaggctggcgctgaagatgttcactactctattgaatttggttcacctaagacaatcattggacatgacttccctaagaagcacaatattgatttaatcgttgtgggtgctactggtttgaacgctgttgaacgtctgctcatcggtagtgttaccgaatacgtaaccagaacttctaaatgtgacgtcttggtatgtcgtactgaagaagttaaggatgctttgcaaggctaattatttagctttaataaccgataaaaaaatacctccaaaattcagatttgaatttttggaggatttttttaatgttatttctaaaaatcgccagccgtactgaacatgtaatcacgattatggaacttcatcgacaagattaatccaatcccaatcatgtttcccatcagagctgaaccaccctgagaaacaaatggcaatggaatacctgtcaatggcaataaatcaatattcatcccaatattttcaaatacgtggaacaagatcatcatgataacaccagttgcaatgtatgaataaaagacatttctggtatcgaacgagatttttaccatttgaataatcaggtataaataaatcaaaatcaatgctacacagccgacaaaaccaaagttttcaccaattaccgagaaaaccatgtctgatccacgaactggaacataaacgctagctttgccaaaaccattaccaaatagttgaccagaaccaatggctttcatactttgccataactgataagctcctgatgaagtatcaccagatggatcgagccaagacttaattcgttcaaattgatatgcttgaaagaaatgactcaacaatgattgcccagccgacgtagttactaatacaataaccccaatagctgctaaaatcaaaataccatataacggtacaataattttccaagaaatccctgatactaaaaccacgccaccaacgatggcaataaatactaacatagtaccaaagtcattctgtaactttagtaaaattgctaccggtgccagccaagcaataattttgcctaataacaaccaatcggtcttaatcgtgtgaccatatttatcattatgctctttgaccactcgagccaacatcaagataaaagctggcttcataatttctgaaggctgaaaagtaatcggccctagtttgaaccaacttttcgcacctgtatctgcagctacgcttctgttatataagaatagcaccgcaatcagcaaaaatattccgattccaaagaaaattggcgcaatcttaaacaactgttctgcatcaaactgcatcacaaccataataattgcaattgaaatcaagtaccataatgcctgcataactactgccctaacaggtgaaccaatatgactaggatcacctaatgcagcaacatagatacaatacaagctaattaaagccaagagtagcactggtataataatattccaggctaatcgatcgaatagacttgtttcattttcaacttttgccattaaataatcactacttatattttatttttcatgtaaggtaaagtatgaaagtaagtcattaatgctgctttcaagactgttagcaaacaaaatattgcttgtcttagaagtagtagcacgataacgcccctctaccttttcaattaaaccaatggactttctattaggaataacaacttcccacgttggcaaattctttcccttaagttcattaacttcaatatcaatattctctaattttttagacataaatcctcctacttgctatccggatgaaattttgaagcaataattggatcttcatatctctccggatgtggatttcgaaaaatagtaaaattatcaggaactggatccactccacccttgataaatgggttacaccttagtatacgacaaattcccataatcagccccaaaataggaccatgttttttcaatgcatcaatcatgtaattggagcatgttggataataccgacaacttggtggtagtaaaggtgaaatcactgtctgataaatacgtacaataaaaatcaaaatcttacgcaagtaatctcctcacttagtgtcgttgatgcttttcaatatttttaagcaaagtacctgttcctaaagcaactgcttctaatggatgatcagcaattaaaactggaacttgcaaataataagaaatcaacttatcaatattctttaatagggctccaccacctgttagcatgattccgcgatcaataatatctgctgaaagctctggtggagttgtttccaatacttctttagctgctgcaatgattgacatcaagcctggttctaaagccttttgaatctctggtgcagtaactgtagtctgcttaggcaaaccatcaactacgtcacgaccacgaacagtaatttgttcatcttggtctggttcaaaggcgctaccaatttcaatcttaatttgttcagcagttctagaaccgattaacaaattatgcttactcttaatgtaactgatgacagcctggttcatccgatcgccagcataacgtaatgattgagaagttacaatttcacccattgataaaactgcaacgtcagtggtacccccaccgatatcaatcaccatattaccttgcggtttaaaaatatccaagcctgcaccaacagccgcaactttaggttcaaagtctaaataaaccttgccgccaccagacttttcagctgcctgaataattgctttttgttcaattgaagtaactccagtaggagcacaaatcaaaatatttggcttggacataaagccttttacatttaatttttcaataaagtaagacagcattgcttcggtaatgtcaaaatcagcaattaccccattcttcaaggggcgaattactcgaatattacctggagttcttcctaccatctcatatgcctctgaaccaactgcaactaccttgtttgtatcggtatttacagctacaacagaaggttcatttaatacgatacctttaccagagacattgatcagtacgtttgctgtccccaaatcaattcctatatctcgtgccacgataaccctccataattattcaccgtccattttaccataaataatcatgactttcctttactgtccttgttttaacacaatctttaaaacaaattactcaattgcattgaagtatcgataaaagtaatgacaaaattgccaactaaaaagcctaagccaattgcaataaataaatataataattgcgtttcaaaaacatggcctttacgaataattttatctagttgaattgctttaactgcttgaaaagataagccaatcgcaatcaaatatataatgatactaataatgacatgaacgcctaattgaaacatatattttcctcaattttgacaaaaaaagacggatgcagcattttgtgcattcgtctcttccttcttctagtgacctttagtgttgtacacgctaattctgttcattgctcgtcttaaagcaacttcagcacgtgccatagtttgttcgtcatgtttttcccgtgcttccttcaaacgttgctcagcgcgttgcttcgctgcctcagcacgagaaacatcaatgtttcttgcgcgttcagcactatctgcaataatcgtagcaacattattcgaaaactcaatatagccacccgaaatcgcaatatgatcaactactgaatccatttcacggcttcgcttaatcttaacctcactaataactagtggagttaaaagtggtacgtggttatacatgattgaacgttcaccatcaacggcacgtacatcaacgatacttccacgatgtgaataaatcattccattaggagttacaacatctactttaaaaagcttctctggatctgccatttgacatcaccctacttttctagtaaagctttagcttctggatcacttggagttacacccatttcttgtgcttttttcaaaacatcttcaattgggccgacaccacgaaaggcatcttctggtaagtcatcaagatgaccatccaaaataagcttaaagcccttaatgctttccttaattggaacatatgaacctggtacaccagtaaattgttctgcaacaaagaagttttgtgacaagaagaattggaccttacgtgcacgtgcaacgatcaatttttcttcatcagacaattcatccatacctaaaacagaaataatatcctgtaattcatggtaacgttgtaaaacatgttgtactcgagtagctacttcatagtgttcttcaccaacaacttcagggtcaagggcacttgatgaagattcaagtgggtcaacagctggataaataccttgttctactaagctacgttccaagttagtagtagcatccaagtgtgcgaatgtggttgatggagctgggtcagtatagtcatcggcaggaacataaacggcttgaattgaagtaattgaacccttcttagtagaagtaattctttcctgcaattgtcccatttctgttgctaaagttggctgataaccaacggcacttggcatacgaccaagcaaagctgaaacttctgaaccagcctgagtaaaccggaagatattgtcgataaagagcaacacgtcttgaccctcaacatctctaaagtattcagcaagtgtcaaaccagttaacgcaacacgcattctggcaccaggcggctcgttcatctgaccaaataccatggccgttttacttaaaacgcctgaagctttcatttcgaagtaaaggtcgttaccttcacgagttctttcaccaacaccagtaaatacggaaataccaccatgttcttgagcaatgttgtgaattaattcctgaatgatagtagtcttaccaacaccggcaccaccgaacaaaccaactttaccaccacgtacatatggctcaagcaagtcgataaccttgataccagtttcaagaatttcacgactagtagtcaagtctgcgtacttaggtgcttccttgtggataccttcacgagggtgatcttttgaaaattctggaccaccgtcaattggttgacccaaaacgttaaacacgcgtcctaaagtatcttcaccaactggaacggaaattggaccgccagtatcttcgactttcataccacgacgaagaccatcggtagattccatggcgatcgttcttaagacaccatcaccaagctcaagtgtaacttcaaggacaatgctttcatcctctgacttaattacacgcaaggcattgttaatatcaggtaaattcttatcaattgggaatttaacatcgacaactgggccgattacttgaacgatttcaccttcactcaaaacatctacctccttttctttattactctaaggcatttgcaccactgataatttcagtaatttcagtagtaatttgtgcctgtctagcacgatttaattttgtagttaagtttgataccagatcattagcattatcagtcgcactctgcatggctgtcattgaactagcatgttcggcagtcttagcatccaaaatagcaccgtaaatagtagaacgtgcatattgtggtaacaacttcattaacacttgatttggatctggttcaatatcgtattctaattctttatgtgcttcagcttctttgacaccaatatctaaatcgacgattggtaacattttttcaacacgaaaagcagatgataatgagttaacgtggtgagtataacatacgtaaagctggtcatagacaccattcaaaaacatcttaattgcggttgaaacaattggtaatgcttcatcaaaagttggtacatctgaaacaccattcttttcataaacaacgttaatattgttctttttaaagaattgtgccgcaaccgaacctacagcaagaactttgatatcgtgtccttgagcacgttcgtcctcaaagatactcatcatattcttaatgacattgctgttataagaacctacaagaccacggtcacctgaaattaccaagaaacctgttgtcttgatattcttacgtggctgaatcatatctgctgtaatccccaaaccaaagacatcagtataatcaatttgagcaacattgttcttatcaattgagacgtctttttcacgtagattatcaactacttctgagctaattaaacgagaaatagttctacgaatatggtcgttataaacggtataacctttatcacgattttcagtttggttcaactttgaagcagagaccattctcatagcttctgtaatcttaccagtttgttttactgaagcaatttttttctttaactcaagtaaagatgcaggcatattctacctcctatttctcacttggtgtaaagctctcactgaattcttcaattgctgctgacaatttcttatcatctggcaattgaccagtttcacgaattgtcttgagcaaatcagcatgactgctgtcaaagttatcaaataattcgttttggaaacgagcaatatcttcaactggaacagcgtcaagatatccgtgagtcaaagcataaagaatcacaacttgcttttcaacaggaattggatcatgaagtggttgtttcaatacttcaacggttctttgacctctattcaacttagcttgagtagcttgatcaagatcactaccaaattgagcgaaactttcaagttcacggtaagctgcaaggtcagtacgcaaagtaccagcaaccttcttcattgccttgatctgggcgttaccaccaacacgagaaactgagttaccagcatcaatggctggacgagtaccagcaaagaacaaatcgctttgcaagaaaatctgtccatcagtaattgaaattacgttggttggaatatatgcagaaatatccccagcttcagtttgaataattggcaaagctgttaatgaaccgccgccaagtttgtcattcaacttagcactacgttcaagcaaacgtgagtgtaagtagaagacatcacctggataagcttcacgaccaggcggacgacggagaagcaaggaaagttcacggtaagcgacggcttgtttggataggtcgtcaaatacgattaatacatccctgccattgtacataaattcctcacccatagcagtaccagcatatggtgcaatataaagcattggtgctggctcacttgggcccgcttcaacaacaatggtataatccattgcgccaaaacgctttaaagtttctacttgagttctaacggttgattccttttgaccaacagcaacgtaaatacaaattacgtcttgccccttttggttaaggatagtgtcgatggccaaactagttttaccagtcttacggtcaccgataatcaattcacgctgaccacgaccgattggaactaaggcatcgatagccttaataccagtttgaagtggttgatcaactgattgtcgatccataacccccggagccttggcttcaattggacgactcttgtcagtcttaatttcacccaaaccgtccactggttgacccaatgggttaactactctaccgattaaggcgtcaccaacaggaacttccatgattcgtccagttctttgaacacggtcaccttcacgaatattgtcaaattgacccaaaataatgatacctacatcatttgattcaaggttttgtgcaataccgtatgagccgttatcaaacttcaataactcaccagacaaaacatcgttaagtccgtgagcacgggcgataccatcaccaacataagttacaacaccaacttcgctgatgtcaagcttatcgtcgtaatgttcaagttgttgcttgatcaaggaactaatttcttccgctttaatgctcaatggtttcacctcttttaatttttatcaattatctgcgcacggatcttcttcagtttattcttaactgatccatcaatcacgcgatcttctacttgaagaaccacgccgcctaaaatacttggatcaactttattctctagacgcaccacgtttaggttatatttcttagcaaaactttcacctaaacgtttgagttgatcatcatctagcttaacagccgtagttgcaacgccagatgcgaccttcttttcattatcataaagtaagacaaagcgatcaataatatcgatcaaatcagcaaaacgatcatatttaagtaacaaattcaaaaagttttgaacctcatctaaaaaatctttttcaattgcagtcaaaagatcctttttatctttattacttaaaataggatcgctcaagacactaatgatttgtggattggcttcagcagccttttttaattccaccatttcattataaacagtgtctaatgcatcattgtcttgcgcataaccaaatagtgcggcaccgtagcgtgctgcaatttcttctctacttaaagccattaatcatccaaccccttaataaattggtcgactaaatctttttggtctttagcagataaattcttagcaattactttttcagcgattgctacagaaatatcagcaacttgatcgcgtgcagaattcaaagcgtctgcttttgcctgatcggcatcttcattagcctttttgcgaattgctgcagcatcttcgtttgcatttgctacgatttctttacttgtgttttgcgcgttactcttagcgtcagagagaatttgtgttgcttcttgtcttgagttcttcaaggcagcttcacgctcattagcaagcgtttcagctttctttcgttcactagcagctgaatccaagtcatcaataactttttgccgccgcttttccatcatatctgatactggtccccaagcaaagtgcttaataagaagcatcaagatggcaaaacagatcaaataccagatagcattacctaagtaaatatgtgaggctgcaaataatgtttgaatagtcatttactgcccttctctctttaatactattcctttaaacagaaaattatctctttttattaaaggaacaaaatcaagaaggcaacaacgatagccaaaataggaacggcttcgatcaaaccaacaccaataaacattgttgctctcaagttacctgcactttcaggttgacgagccataccttcaagagtctttgaaataactttaccgttacccaatgatgcagccaaagctgctaaaccagctgcaatggatgcagcaagatatttaaaagcttctgacataaatttatacctccaaaaatttattctgtagtaaccttcttaccaatgtaaaccattgataaagttacaaaaacatatgcctggatagagccaatgaagacagagaaaccttgccaaatcatggctaatggagctgccaaaactaacgtaaatggtccaccagcatgtgctagatcattaccaattaaagttagcaaaacttcaccagcataaatattcccatatagacgtaatgataaggttaaaaagttggtaaactcttcaattaaattaattggaagcataaaaccaactggttgcgtatagctcttcaaatatccgccaacaccaaatcgttgtacgccgaatgtgaacgatagaagcaaggtcatcattgcaaacgacattgtcgctactggatcagcagttggtgatttaataaacatccaatcatcaactttgacttccatgaacatccctaattggttcataaaccaaataaacaggaataaaacaaatgcatatagtgataggtgattttgagcatccttgtcgctaacattatctttaacaatgccgttagtgaaatcaagtaaatactcgaacacattttgtctcttattgggtttcatttcaacttttcttgaaagccaaatgcagataaataaaactgctaaagccattagcgttgaaccgataataccagaaagttcaaaattcaagcccatgaatttaaaaacaaatgatttctccattacttcgtgacctcccttctcgtgctgaataaaactcgaacacgtaaatcatcttaacaccaaaaaaggtctttgtgtaaaatgaaagcgcattagagaaaatatttttctaaaaaggacgattacttagtaccaaatagtctgtcaccagcatcacccaaacctgggaaaatataaccattatccatcaatttgtcatcttcagcagctgcataaatgtcaacgtcaggatttgcttcttgaactgccttaataccttctggagcagctaccaaaacagcaagcttaatttccttaacaccacgcttcttcaatgcagcaatggcatcattagctgagccaccagttgcaagcattggatcaacgactaaacattcacgttcagcaatatcctttggagccttgaagaaatattcatgtggcttcaaagtcttttcgtcacggtacatcccgataacggcaatcttagctgaaggaaccatttcaaggacaccattaagcatccccataccggcacgtaaaattggcacaattgtcaacttcttaccagcaatttccttttggacagtcttacccattggtgtttcaatttcaacatcttcaagtggcaaatctctagtgatttcataggtcattaacccaccaatttcaccaacaatgcgacggaattcatttgaccccgtatccttgcgacgaataatagtcaacttgtgttgaatcaatgggtgatccaaaactacgaactttcccatatatgcctcctataaaaaataatatgatcattaaatattttaatcaaaaacgcaaagggtttaaagccctttgcgttttattttttatttattgaaatgatgtccacctgcagctttattcaatcgattcatgtaagctaaactttcttcaccttcatgaaatccttgtacataaatagtttcgatatcatcttgatcatcgaaatagcgcaagccaccaaataagttatggtcggcatcaactaaattgttgcccagatcaaatttatttgcttgaggtaaattaattttagctaagactggcgctaaagctgctacaccaattttttcattaaaatcaatttttgcaaaatcagcaggatcatcaaccacgactaccggctcacttggagcataatgacggtatttcattcctggtgccttaggtatatctttgtctgacactttgcccgtgttaattaaaactttttcacctaaaacttcgcttaactcttctggagtaatttcaccaggacgaagaacgattggtgtttctaccgataagtcgataattgtcgattctaatcccacacgagtagggccatcatcaataattccggcaatcttcccttttaaatcatggtaaacgtgctctgcagtagtaggactaggcttagttgaggtattagccgatggtcctacaattggataacccaatttagcaattaaatcatgagtcaattgatcatcaggacaacgaaatgctacagtatcaagtcccccagtaactgcatctggcagagttcctggtttaacaaacaatagcaatgtcaaaggacctggccagaaatgtttaattaatttcttagctctttctggaacttctttagcatacttagccatcatttcttcgtcagaaacagtaacgatcaatgggttatcacttggacgtcccttagcagcataaacgcccttcacagacttttctttggttgcaattgcacctagaccatagactgtctcagttggaaaagcaaccaattcacccttagctaacaacttaactgcatcattgatttgatcttttttaaaaatcttcgtttccatcattcttatttttgccaccttccatgaaccatgcgtggcttgccggccatatcttttctaaattcgatttcaaaatcaggcaattctttagcaaacaattccttcagttgttcttcttcgctaaaaccaaattctaagaaaaattctccatggctattcaaatgctcacgcacttgcttagcaaattttttatagaagtctagaccatctttgccagcaaaaagagcttctttaggttcattttgcaagacattttcatccattacattcttttcgcttgtcttaatatacggcggattagagatgatcttatcaaattcttctaagcccaacagcacgttggctttacgagtagttacatcaagatcataagttaaaaagttttcctcacttgttcttaaggcagtatccgttacatcactagcatataaagttaaatctgtaatgccttttttctgtgcttctttagctaaagccacggtaatacagccagaaccggtacccaagtcaaggacttgatcacctgatttaagtgtctgcaatgcccattcaaccaattcttcagtttcaaaacgaggaatcaagacaccgcgttgcaccataattttatagcccaaaaaccaagcataacccaaaatatactgtggagatatgcccttagccaatttttcgatatctttattggcctgcttaatctggtcagcagttaagtccatttcttgcttcagttcaaattcacttggtgtcaagcctaagcgctctgctagaacataatcaacatcctcaggacgcgcattttcagcactctcacccgctttaatacgcatctgctttaaagtcattttaggcattttgatcagccaactcctctaattgcttagtttggttgtaaagaattaatgcatcaataatttcatcaagttcaccgttcatcacacgatcaagcttgttaatggttaagccgatgcggtgatctgttacacgattttgtggatagttatatgttctaattctttcggaacgatcaccagtaccaactgcattctttctcttagcatcgtactgagcttgattttgactttcataatagtcataaacacgtgatttcaaaatttgcattgccttttcacggttctgttgttgactacgttgatcctgcattgcaactacaatcccggttggcaagtgagtcattctaacggcactagaggtcttgttaatgtgctgaccaccggcaccacttgaacggtaaacatcaacacgaatatccttaggatcaatatcaatgtctacttgctcatattcaggcataacagcaacagtggcagttgaagtatgaacacgtccttgagattcagttactggaatccgttgaacacggtgtgcaccattttcatactttaatttcgaataaaccttgtcaccagtaatcatgattgccacacgtttatagccgccaacctcagtaggttctgaatcaatcattgaaaccttccagttttgacgttcagcatatttttcatacattctaagcaaatcgccagcaaacaaagaagcttcgtcaccaccggcagcaccacggatttccatgataatatctttatcatcgttaggatccttaggcaacatcaaaatcttgatttgatcttcaagctcgggaatttctttctcaatttcagaattttcttccttagccatttcaattaaatcaggatcagtttcactggagataatttctttattatcttcaatctcttttttgtcctctttgtacttcttatatttttgtactacttcacgcaaatcggcttcttccttagaaatctccatgtagcgcttagtatcattaataacttcaggatcggccatcatttcctgaagttcttcatagtgagctactagaccctctaattgagccataactttatccataaactaaaaatcctctctatctttcaacacctgggtgaaagtaatgatagcgacaaacaggataataactttcatcgccaccaatttgtacttgttcaccctcataaacaggcttgccattgttaattcttaaattcattgttgccttgtgtccacaataatgacaaatggtcttcatctcttctattttatcagcaaaaatcaataaattttcactaccttcaaatagatgattttgaaaatcgttttttaagccaaaggtcattactggaatattgaacacatccacaattttagcgcattctaagacatgatgtctcttcaaaaattgtgcctcatcaattaacacacaagctagtttaccatcaccatcagcaacatctgctttgttcatctttttaatataatcaaatagattcatatcagcagtaattggaattgcttctcggtgaagtccaattctagaagcaatcgttcctacaccgctacgattatccaagccactggtcattagggcaatcttgcgcccctgtgcttcataattgtgagctactttcaagatctcaattgttttgccactgctcattgcaccataacgaaaaaataattgcgccatgctggccctcccttttaacaaaaagtcttcgccttaatagtatagaggaaaaaataaatttgtgtaggtattaaacctcgttttcatcctcgctctatgctaaacttagacatagttttaaagtgagggatgtacatgagttttaaatcaggaattgctaaagttgccggtaaatcaagctattggtttttgcataatgcccttaagggcggcaccagttttccaggcaaattagcaatgaaaattgatccagaagttttaaattctttagccaaaggctatgaaactgttattgtcacgggaactaatggtaagacaatgactactgctttgattgttgaagctttaaagaaaaagtatggtgatgtgttaactaatccatctggttccaacatgcaacaaggaatcgtgaccgcttttttggctcacaagcacaagagagttaaaagaaaaatcgctgttctagaagttgatgaagcaaatgttaaaatggtgaccaaattacttcatcctagcgtctttgtattaaccaacattttccgtgatcagatggaccgttatggtgaaatctataccacttatgacaagatcgttaatggtattaaattagcacctgacgctacaattatcgctaacggagatgcaagcattttttcatcagttgaattgcctaataagaaaattttttatggctttaaacttcctgatgacaaacctgaaaacgacttcaaggctccagtcaataccgatggtgttctttgtccaaaatgcgaccacattttacattatcatgaacgtatttatgccaacttaggtgacttcttctgtcctaactgtggctaccaccgtcctgatttaacttttacagttaacaagattattgatcaaacacctaatagctcaacgttccaaatgggcaacaagcaatattccattaatattggtggtacttataacatttataatgccttagccgcctattctgttgcacgccacttgggattaactgaagctgaagttgctcaagcttttgcagaaaataaacggatctttggtcgtcaagaattaattcactatggcgataaggatatcgatttaattctagttaaaaacccagttggtttggatgaagtcttgcacatgcttaatacagaaaaagatgattattcactagttgccttgcttaatgccaaccacgctgatggaattgatacttcttggatttgggatgctgattttgaaggattagacaaagaaaagattaaaaagatcctcgtcggtggtcaacgctggcatgatatgggctttagacttgaaattgctggctttgatccaggacaaatgagtactaatccagatgatgatagcctaattgaagaaattaaaaaactgccaactaagaaggtctatattctttcaacttatactgcaatgcttgcacttagaaagaagatggccgaaaagaaaatcattaaggctggtatgtaaatagaaaggattcccgcgggaatccttttttgtgtacaaaaaaggctgtagctctaatgccaatgtcattaagttaagacattgacaattaagggtgcttttttagagatcgaatcatttggattcgatctctttttttgtataaaataaaggcgaaaagaccagccttttcgcctatcttatatattatatattttaaaccttcaaaattattgccagaaagatggtgttaattatgaaagcccttcataagaatattctagaacgtcttgatcaaattatcaataatactggggatcatattcacgattttattaataatcctcatgcttttaccaggaaacgcactttagatgcagcgacagtccttaaaactacaattaacatgcaaggtcagaatttaaacagtgaactctttagagcttttggcgaagatgcaactaaaaagaacgataaagtagttagtacttctgcctatgttcaacgcaaaagccagctttctcctgcttgttttaaacatattctgactgtttttaatcaaaatctatttaatattcaactttttgatcatcactaccgtttgtttgccattgatggctctgactttaatcaaatctggaatccgaaatcgaataacattgtacaagcttcttctcataaaaagaaaccctattgtcaaattcacgttaatgccttatatgatctattgaataatacctaccaggattgtatttttcagcctaaatcagaaatggatgaacgcaaagcggctgttcaaatgcttaaagctttgaattgtggtccatatattgtaacaatggatcgtggctacactagtttcaatatgattgaaaactgcaatcgcctgcctaactgtcattacataatacgaactaaggctggacaaggcggagttaaagaaataacgacattgcctgatcaagaatgtgatcgtgagatttcctgcctggtaactacttctaactattactacatcacgcataaagccagtgagaatattcaccatgtccagcatcattatcgccaatatattaagtatcgctctaaaaatacccaggatctaagctgggattttggcgagttatgcacaataaaatttcgagcctgcaaatttagaattaatgatgccaaatcaggcaaagaagaatgggaagttgtgctaaccaatcttgatcgaaaaaattatccgctaaaaagaattaaagagctttatcatctgcgttggggtattgagacctccttcaagaaattgaagtattctttaggcagtgtacagttccattccaaacaagataaatttattgaaatggaaatttatgcccatatgattatgtttaatgcaatcagtcaaattgatgcacaggcctatattccgcaaaagcattgcaagtatcaatatgccatcaatttcaagcaatcatgcttgattattcagagcatgtatttggcttcttctttaacgcaagattttgaacggatccttattcagatcagctattataccattccaattagaccaggccgcaaggacaagagaaatattaagcccaaatcagctgtatattatttatatcgcgtagcttaaaaaagcagaatctgtgctatgccttatttgttgtacgaaaaaagcaccaatttaaccaattaaatgttaaatcagtgctttaaaagtctaatattaattgtcaatgtcttaacttaatgacattgctctaatgctacagcctttctaattattgggatattggggctcgaacccaaacatccaggaaccagaatcctgtgccttaccaatttggctatatcccagtaaatcacccgtacgagaattgaactcataactccaccttgagagggtagcgtcttaaccatttgaccaacgggcgaatcaacatttataattatgcttttttcttctatgcttgtcaagtaattttaactataataatgctaatggatggtgaaacatgatcgactttaataaaacacagcatttaattgaatcaatggtttttgaacgcgttgttccaggcgtcaattacacttttatcaaaaataagcaaatttttacatcaactactggttttgctagtatctacccagaagttactcagctgagcccttttgcagaatacgacctagctagtttgactaaggttttagcaacagaaaatgtcttgcttaagctttatgaccaaggcaaacttaactttaccgagcccttgcagcaattcgttcctgaatttaaagacccgcgtgtacgcctttatcacttgctaacccatactagtggcattcgtggctggatcccccaccgcgacaaactagatcatgatgccttactacaagcaattatcaatctgccagtaactgacgaatttgaacacaagatgcggtatgccgatacaaactttatcttacttggattagttattaaaaagatttttggtaaacctgtccaagaagtagtcacagagcaagtcctcaatcaaatgccgcttgaaaatactactttttcaccacaaaaagatgattgcgtgcctactgccctagttgatggccatgtcttgcaaggtattccacatgatcctaaagctagacaacttggaatagattgcggttctgctggcttattttccaatcttcaagacttagttaccttcgcccaaggttatttaggactaaaggatattttaccttatagtcaaaagactgtcagccagctatttgataataaaaatccccaaggcataaaaccacgctcttggggatgggaccttcggtttgatccaaagcaaaattatccgatcattttgcacacgggttttactggtactttaattattcttgatcgcatcaaacgctctggtctaattttattgaccaatcgagttcatccgactggacacaacactgttttcttagctatgcgcgaaaaaattatccgtagttttatcaacgaaaacgccaaaatataatttatagaaaaaagacggctgtgtgtcagtcgtctttttatctctcactaaatttcatcatccgtctagtattataacttattttaacgctaatgtactagtcaaatattatttttctgctttaaacattttccagtagctaattaaaatgattaatgccattaataaagtaaaataaaaggccgcctgactaccttgagctgtcgctagtgcgtaggacgttgcaccttttttctgccagatcgacataattgctgctaagatagttgttcctacagaaccggctaattgctggctagtctgacaaactgcggttgcatcggcgcgcaatgctcctttttccacctttaaagcttcagctagcgtgttagaaaatgacattctgtgtcctaacatcatgatgccataaataataatgatcatcatcacagtcaaatttaagccccaaatagcaaataacaagcagctgatcgccattaagaagccacctaaataaagtggcaatttagctccttttttatcatataggctaccaaaatatggattgagtagccctgcaataatactacctgatagtaaaatcaaaccaccaactaaagatgtttgctttccgacaatttggatgtagttaggcaatacaaaactgataccaatattattaaattgcaataaaaagtaagctaacgcaccataaacaaacgctttttgcttaaatacggctagatctaacaatttcttggatgattttttagataatctaacaaataaccaaattaaaattgcagtcacaattaataaaatccacattaaaggattagcaaatccattactaatttgatttacgcctaatgtcaaagtaataaatgctatagctaaaacgataaatgatagccaatcaaaactatttttagtttgttcatgatacttaccgactacaaatagcccggcaacaaaaacaatgatcgcaaaaattgtaacaaaaccaaaaatccagcgccagttaagataaaaagtagtgataccgccaaatgctggtcccaaagtcggtgccatagctactactaagccggcgattcccatgtaaacgccccatttttcgcgaggcataacttcggttactaagttaaacatcaacggtgtacttaatcctgcacctagagctgaaatcagccgacctaacaataaaataggaaaattaggtgctacagcactaattacgcttccaatcataaaaccaacgcaagcaacaataaacaattgccgcgcagtaaaacgttcattcaaatatgaagaacaaatcataataatcgcaatcgccaataaatatcctgttgtcgtccattgaattatatccaaaccgacaccaaattgcttcatcatcgtaggaaaagtgacgtttaaactagtttccgtcaaaattccgacaaatgacataaacgcagctgataatactgctaaaacatttttagtattctctttcacacaaaaatcctttccacaaaaaaagaaagagcaaaaaacctttgtttcctattctttctttaattagcacagctaattatattaatacgcatactatcaaatatgctgagtatatctaatattaaagacgcttagctaaatcgtcgtgtaagttttcgtaacctggcttgttaagtaaaccaaacatgttacgcttgtaagcttcaacacctggttggttgaatgggttaataccgttcaagtaacctgaaatagcaattgctaattcgaagaagtaaatcatgtaacctaaagtatgtgcactttggtctggaatgttaacagtcataactggaacaccaccatcggtgtgagccaaaacaacaccttcataagcacgatcgtttacgtagttcaagctcttaccttccaagaagttaagttggtcaaggttcttttcatcgcctgggatcttaacatcatgacgtggattttcaacacggataacagtttcaaataaattacgtaaaccttcttggatgtattgaccaagtgagtgaaggtcagtagtgaagttagcgcttgatgggtaaatacctttttgatccttaccttctgattcacccattaattgcttgcaccattcaccgaacattcttaaacttggttcatagttttcaacaatttcagtagtgtaacccttacggtaaaggatgttacgaagtgctgcgtattggtatggagttgcctttgacaaatcagtatcagtgtagtcagcacgtgcgtctgcagcacccttcatcaattcgtcaatgtcagcacctgaagcagcgattggaagtaaaccaacagctgaaagaacactgtaacgaccaccaacatcatcaggaactacaaattcttcgtaaccttctgcatcagcttcagtctttaaagcacccttttgacggtcagtagttgcgtaaattctcttagcagcttcttccttaccatacttcttgattaacttgtccttgaagattctgaaggctactgatggttcagtagtagtacctgacttagaaattacgttaacactgaagtccttgtcgcctaaccattcaatcaagtcataaaggtatgagcctgaaagtgagttaccacagaagacaacagttggcataccgttcttttccttgccatagaaattgctgttcaagaattcaattgcagcttgggcaccaaggtaagaaccaccgataccaatacaaatcaaaacttctgaatctgattgaatcttcttggctgccttcttaatgcgggcaaattcatccttgtcatagtcaactggcaaattaagccaaccacggaaatcgttacctgcaccagttccatcgcgaagttcagtgttagcagcgttaaccatagcttgcatttcgcttaattcattttcatgaacaaattgtgttagtttactactatcaaatttaattaaactcataaatctgcttcctaactaaataaaatatttttcacaaacctattttaacaatcttgatttataaataccagtacattataagcgcattcaggcttttttgacaattttaaaaatcacataaccccaaattgctccacaagtattgaagaaaacatcatcaatatcgctaacccccgtcaccagcaaaaactgcagagtctcaattcccactgaaaacagcatccccatcagtaccgtccttaaaaacgttgctctttttgaaaaaacaatggggaaaaaaatgccaaacggcacaaagcacaagacattgccaaaagaattataaaagaaatccaaatgactgggagcatagactaatttccaagtttccttcatgaataccaagttaatatcactcaatggcctagagaaattaaaatcaagctgccacggaaagtaggtatttctaaaagttgtcagcatcaaaactaagattatgtaaaaagaaaagacccaaacgctagcttcagacctaattgatcttctgcggcgcaccaaaagaagccaaattaagcgcaatacagcaaaaattaaaaaataaaatattgttttatccagcgctaataaggttaatttaactaatgcaaagtggttaatattagttgcatactgtttagctaaaaaactataaagtgggcccaaaaatagcatactttgcctctttccaaaatattcattatagattatacctattttcacggctggaaaatcttaaaaaaaagataactcttagcaaattattgtttcctgaattgtcaaattaagtgcaacagttaggctatgaggaaatatattgcttgaagagttcttctgctgtgtgatattggaggattcggcgatatttgtggttaatggcatcagttgcctgttgaacataagcttttgacttgtctttcatgctcttgcccttagggaagaattgacgcaaaagaccattgcagttttcattggtgcccctttcccatggagaatatgggtgagcaaagtaaatctggcagcccttgatcttggtcatatccgcaaactcagagccattgtcaaacgtgattgatttaaaccaggcaggatgtctgtcaatctccttttgaagcagcctttggcatgtgcttgcccgatagtcaggaatcttgataactacttcaaagcgtgtggttctttcagtcaaagtcattaaagcaggctgattcttgcgtctgacgcctttaaccagatctccttcccagtgcagcggagcttttctgtcttcaatctctttaggacgctgttcaatggaattgccaagatgcttcttgtgcaaagcgtgaccgccatggctgtgatgacgcttgttcctgcgtcttttgagcttcataggcagatcaatattgcttatgtccagcaagccctgatcaatatagcgatagacagttggtgtgctgggacaagggtagcctggcatagtccttttgaattcaccaacgaactcatcgatgctggtggcatcaaatttagctttaaagcgtctggagagcattctcaaaaagacagcataatgcttcaatggattgcgctgatagcagtttttgcgacgcttctcataataaatctgtgcagtatcagcgtaatagtgctcatacaataaatagctgctgtctctttgcaggacgcttccgcgtttgatttcgcgactgattgtcgacttatggcagccaacttcttgagcgataacagtacgggaagttatgccggaatccagcattgcttgaatttgtccacgttgtacgctggttaattgatgatagtgcttagaaatgctagaatttgaattggtcataaagatcttcctttcttgatttttcgtcacttcaagtttaggtcttcatggcctttttgtttaacacttagtgttgcacttcaattttaaatccgggcaaattattgttttaaaagaggtgaaccattaaaattaaaagatgttaaaggagcattatatggaaaaaaagaaaattatcagttttattcaaacacgaacgggctttttaacccttttagttgtttgtttctggctgaaatatatttttgcagcttattttgatttcaatttaggcttgagcgacccgtatcaacatttcattatgtggctcagccccgtagggtccgccatcattttaatcagcttcggtttttatattcctaaaccgctgatctcttacatcacaatgttaattttagactttgccaatacggcattgctttttgcaaatattatctactatcgtcaattttcggactttttaacaattaaaacgatgtctaacgttggtaaagtttcgcagggtctaggtaaaagtaccgttgcccttctgcatccaacagatattattatctggattgatttgatcgttattgttactttactgatcattcataaaatcaaaattgatcaaagatcttacggcttatccaccccatttgcgattacctcagtaggcgcatttgtcctaactcttaacatttttttggcagaaacctctcgtccgcgcttattgcgcaacacttttgatcgctcctatgtcgttaaataccttggtattgacacctttactgcttatgattgcttcaagagtgcgcaaaatgttcaagtcactaaaaatgccaacgctgcggacttgaaccagattttaacttttaccaaaaaacaaaatgctgctccatcttcctcatattttggtattgagaaaaaacgcaatgtgattatcatccacttagaaagtttccagcaatttttaattaatcttaaggttaatggcaaagaagtgacgccgttcctaaattcactttatcaaaataaacatacgctcagttttaacaacttctaccaccaagttggtctaggtagaaccagtgacgcggaaaacatgctagaaactagtacttacggtattcccgacggatctttattcacttctttaggttcggaaaacacctttcaagctgcaccgcaaattttgcgtcaagatggctatacttccgctgtctttcacggcaacgtcggtagtttttggaatcgaaatgatgtttataaaaatatgggctataattatttctttgataaaaattactatagctcccaaagtaaagatgcaagcggctatgggttaaaagataagctgctttttgccgaaagcgttaaatatttagagcagatgcagcagcctttctatgctaagttcattacggtaaccaaccacattccgtttaacttagataaagaagacaaggaccctaactttaagactacaaacactgccgaccaaactatcaacaattactttgaaactgcccactacctagatgaggcattgcgtgaatttttccactacttaaagtcttctggtctttacaaaaactcaatggtagtcatttatggtgatcactatgggttaagtaattctgaaaatgaaaccttagcaccaattattggtgaaagctctgacacgtggaatacttacaataatgttcaaatgcagcgtgttccattcatgattcatgccaataatttgaaaggaaaaattaatcatgaaattgctggtgaaattgatgtcttgccaacactgatgcatttgctcggtattaacaataaaaactatgtccaattcggtagcgacatgctttcgcctaaaagacaaaattggatcgtctttcgtaatgggaccattgtcagctccagatatatcatagttggtgctaaaggaatcaaaggtaccgtttatgaccgagttagcggtaaacaaatcattaattttactcctcaagagaaaaaagaaatctctgagctagcacaaaaggccaaggcatcattagactattctgacttattaaacaaccacaatttgttacgcttctacaccccaactggctttgtccctgctgatccaacccaatttgattattccgtcaattatcaaaaaatgatcgctatcagaaatgaattagctggcaattccacctcgctttatagcagacatcgcggtacaactactaatctttaccgtactgatgccgctgaactaaaagatagaaaacaagaaattacccaagttcctgacagcgttaaaaatattaaagagaatacgaaaaacaaaaatagttcagaaaataccaataactaaaaagaacgcacagacctttcaaaaaaactgtgcgttcttttttagtttttagctacaaactgttcatagcccttgtcataaaaggtcacggtgaatgtggaacctttacctggtgcggaaaatacttctactttgccaccatgttgcttaatcaaagaagaaacaatcgcaagtcccaagcctgattcgccagttcccattcgagcacgcgatggatcagccttgaaaaagcgttcaaaaatatacttagtctgattcttgctcatgccaataccattatccttaaccgataattgtgttccatgctctatccgtttacccgaaataataattttgccatcatgagtgaattgaatcgcattttgaactaagttaaccattacctgggtaaaacggtcacgatctgcataaataggcaactgatcaggtgcctctacaaccagctcatcgttggctttagttgcattttgttttaattgcgacttcaaatcatgcagaataattgtggcattaaagttagtcttaaccagcataatttgattatttcgaatcttttcatagtccaaattttcattgactaaccgaattaatcgtttagtttcgcgctgcattaacgcgattgacttcggtttagaatcctctgggatagcatcgtattgcaagccctctagaatgccattaattgttgtcaatggcgtccgcatttcatgagcagcatcagccatgaattggtctcgtcgctcttcttgagccttaacctcttcgttcgactgcttcaaagcctgcaccattttattgaaattctcagccaattgatcaatttcatcgctatctttatgctcaatttgcacattaaagttacctgatgcaactttttgcgtagcacgtgataatcgcttaattcgtttagttgaataataagaaataataaagctcagcaacaatccaaccgctacagtaattaacaatgcacgcaacaaattgcgtttagccattaaaatcggtcgctcaacatgctttactctcgatcctatccaaacaatgccaacaagatttttgccattcatccatggaaccaaaacccccgtgtaggcatccttagttgaactaatcggtgaattttcattatgattattttgaattctaatctcttgcccattttttaaagtagtaaaaacttcttgtgaaagctgaattctagcctttgttttgggataaatctgctcatttttatcattaaaaatacgtaaatgagcatcatcaccacgaagaacatattctaattgattcaagaagttattgctaagcaatgcagtcccattttggctatcagcttccgccaagtttcccaaagaattagcatagctttccatccgctggtagttttgcgtataagcttgattacgcgcataaccaatctctgagtaaccaataatcgagatagttgtcacaataatgagtaagaaactcaacatattttggtaaattaatttcattatttgacctgcgaatcatcaaacttgtaaccgacgccccaaacagtttggatcaccttggcaccaaccttctctaatttctgtcgaagctttttaatatgagcatcaacagttctttcttcaccataatactcatagccccaaactagttctagtaattggtcacgagaaaagacttgtttaggcttttgtgccattgtatacagcaaatcaaattcttttggtgtcaaacccattaccggctgattatcaaataaaacttctcgtctattttttgaaatcttcaaatgatcggtcgtaatctcatagtcttgattatcttcttgagtatgagctggttcttcttccatcatcacgcggcgatgcaaagccttaatgcgggcaatcaaagcaattgggctaaatggcttagtgacatactcatcagctccgatacctagccccaacacttgatctgattcactgccacgagcagtaagcataataattggcactgtcggcgaaattgcccgtacctctttagctacttgaatcccatctttttttggcaaattcaaatctaacgtaatcagatcatacttatccgcgttctttttaaacatatcgacggcttcgacaccatcaacagcaatgtcttgttgccaaccttcttttttgaaaaacattcccatcatttcagctacggaagtgtcatcttcgaccattaatattctcaaactcattatcaatccctaaatccttttgttctcttatgcttcacttgatcaggatcgacatagtcatgtggcaattcatgtcgtttagacaaaaatgttttcaaacttttttcggtataaacaattggcaataagataaataaataaaatgttaacagccaaatgagaaaatagcgatcccaattcaaatagtgaatgattactcctaacagtgcttgaataaacccaaacaggatacaataccagcttgcccgtttctgagcaaacttaaaactatcctggttaacttgcgcaagataagataaatagccataaattcggttgggccttttggctggcgtaatcagccaaatcaaccctaccgccaccataactaagccacaagcgacatagatcacgatttctcactcctaattctgataaatttaaacggttattcctcacctggtgcagacataactattctcattttaccagtgaaagtgaaattcttcatctcatttggaataattaaattagttcccatcttcaaatcatatgacttgccatcagcttctaattttccttcgcctttgataacggaaactaacaggtatggatgatcctttaagccggtcttccaagtaccatcaaggtcaatttgccacaaataaaagtgtggtgaaagtggtggttcaaccaatgtcttaatttctgcatcttgatcttggctagtcttaacatctaacttaggatcaacatggggaacagtggtcacatcaattgacttttgagtatgaagctcacgctttttaccatccttgcccacacgatcgtagtcatacaagcggtaagttacatcacttgactgttgagtttcaattactaagcatcccttagttaaagcatgaattgtacctgctggcacatagaagaaatcgcctgctttaaccggaacttttctgagcagcttatcccattcgcctttgtggatcatatcagctaattcttcacggctttttgcatgatgaccataaataatataagcacctggatcagcttgcattacataccaagactcagtcttaccagaatcattttctactttgcgagcataatcatcatccgggtgtacttgaactgataaattatcattagcatctaggaattttaccaataatggaaattccttggccttaggattgccaaacaattccggatgcttcaagtaaacatcccgcaatgacattcccttaagtggcccatctgttacagttgacgcgtcatccttgtaacctgaaataatccaagcttctccaacttttccttctggaatatcatagtgaaaaatatcatctaatttacgtccaccccaaatttttggcctaaagtatggggttaaaaataatggttccatttaaatcacctcaattaaagtataaactttaaggcagaataaatgaaacccttttcttagatatatgtatactatttgttttacatgtaaagctacttgttatacttacgaatacctgtagctaatctttgcatcccatccttgaccatcgtcaaaggacaagctagattaattcgaataaaatcatggccatttccacgataaacactaccagctgaaataatcagcccagtttcttggcgaatgaactctgctaattcctgtgaatcagtactgatcttttgcacatcgatccacatcaaatatgtcgcattgcccgaaatgatttgtacttcaggaatgtttttttcaataaaattctgcacatacgcaaaattttgctttaactgttttttcaaagcattaagccaatcatggccttgctcataagccgcaatcgttgctggaatcgccaataaattaggctcggctacttcatcactatttaaaccgcggttaaccatattgcgcaaattttcattaggaacaattgccgtagcagaatgaagagcagcaacattaaaagttttgcttggggacactagtgaaatcacactattttgtgcttcacctgttacagaaaaggctggcgtgtaatctggaccttgtctaaccaaatcaccatggatctcatccgatagtaatgttacatggtattggtgacaaagatccgcaattttttgtacttcttcactagtccaaacttttcctactggattatgtgggttacaaaaaatcatcaaagtcgttagcggctcagctaatttttgttccaagtctgcccagttgatcgaataacttttaccatcgaaagctaaatcactcgacaaaacatggcgcccattattcaaaatggaattataaaaaatattataaactggctcttgtactaaaacattatcaccaatatgtgaaacacggcgtacaattgatgaaatagcagggactactccagtagtaaaaatcatccaatttgtttgtggccgatgattatgttctgtttcataccaatcagcgacagcattaaaataatctgcttgtgggaactcataaccaaatgcacctaatgtcaatttttgttgcattgcctcgataatttcaggtgccgtcttaaagtccatatcggcaatccacattggtaattcatcagacttcacatcccactttactgaatcagtctttgacctatctggtgcattttcaaaatcatattgcatatatctcactaatcctttggtgtttggttcgtatcagaatgaacaatttttgtacctattttcggacaatcaagctcggttttagatggatctaccttatctggatcgataatcaaagtaccaatctcaggtaccgtaattttaccagaaattgggtttttaatactatcaatctttgtattaagctccacatctaaattagaaacatattcaaaagctaaatctgtatgaatcaaggaaccattcttaatctcaagctgatcaatgtagttcaagccctgatcactttcaattttacaattaattaacgtaatgttgttagtattccaaactaaatattcaccatcaataattgaatcgtaaatagtgacattattgcaattccaaaaagcatctttagagataaaagttgaattatgaacttcaatgttttctgcaccatcaaaaacataatttcccacaacggaaacgtgatcaagataaatattctggctatctttaccaaaataatcaccattaatttgagaattggtaatcttaatatcattacaagtccacattgtttcttctgcgttagcaaaatgaacattatctaaaataatatgacttgtccttctgaataatttaggtgcctgtaaagcactatttttaattgaaatattcttggtataccaaattccagaccgtgacatagtttcaaacgtggtattttcaactttcacattttcatcataccaaagtggatatttccatttaaaaattgaattctttaatctgatatttttagcttcttttaagggagattcaccactgccaaatgtaataccatcaaggattgcatcagttaatccataaagaattctttcacctgcaaaatatttatttttgtattccataattgtttccacctttttgttaatttaataatcattaattttaggacagtattcattatatgatttctttcatgcaatgtttaatacttatttttagtgataatgcataacaaaaatgcatagcagataaacgatttagcaaaacaaaaaaccgctctagaacaacatctagaacggttatctatggagatgaggggagctatctctacttttagttaattccaattacttctaagtactgaaattaagccattttgatgttggttgattttaattaattttgaagttggatacctttctggatacctgataattttgacaataaaattaaaagcctatatactaaattttgtcaggttagtatataggcttcgtttttgtgtcactagattttgtcgctagtgacttttttattcttcaaattcataagaatctgaaatagcatttataacatcttttataaaagatgcaggtgcatgatccactttgtaccaatgccgtgcagctaagtctaaagttgtttcctgttgtgcttctgcaactccatggacttttaaaccttcaggaactggaatatgtaacggaaaatcattttctgttttactaatcggtactactttcacaagtgatctagttaacctagtaaagtcatgattagatacaattaaagcaggtctagttccttgttgctcatgtcctaaacttggatcaaaaccaataatgataatgtcaccttgatgaacatcaatcattttttcaccccccctttctatattttaggtgactttcttaccatttaatttctttacctacaggcttgccccaatcaacttctttggattcaccaggatgttcattatcccatttatcccaatatgcctcataatcaaagccctcaaatcgttgtgctagcttgctctctttttttcttttcaaaattagttctttattcttaacttttacctcaaaagtagctttttcagtagtaattccaagatctctgagtagtgacttagaaagtctaataccttgggaattaccccatttttgcaatgtaatctccataagaaaacctccaaaaattacttatcctttactaagtatatactagtggatatacttagtaaaggataaagtagtaaaaatcagttttattgttagaatctttatctcagcataactacaataaaaagccatcctatgagtcttgatttctaggatggctttttacaataatacatatcattaaatatacgctacatatatttaaatgatcaatatagtctgcttaatcttcttatttcatttccaactttccttccaaaatcacatcattcaagaaactagaagatgaactatatccatgttcttttgcaatctctgtcaatttagttcttgcacttggtctcaagctaaaggtgtaaggtcttctcttttctctcttaatgtaattacttgattctttagaaggtgcttccttactagacgcttcactaactctagaagtttctttcaatacttctgcaaactttcttccttgatttgggttaaaactcatttaaaaatcctcctaattattcctacactgtacctaacttcttggtacctaaaacaacatatcctggtacttgtttaaaagtggtcttgtatgtgatcaagcaatgaatctctcgtcctgtgtaatttgcggttgttggattatactcttccagcaatagcaaatctcctacctgataattacgatcattttttctaatttcaaaatttttagagttatttacttgtgcctcaaaataacttggaagaatttttactcgatgttctttgatctcatatacgccacttgatgtatatactttcattagcattacctcatattttatttatacattacgtatacttagtttatatttaatgtatatttgctttatacattatttgtaatggagccaaagataccatttaactcattgaaaaatgatccatacctagattgcatttttttatctttcatcattgtactgattgccactttatctaaagtggagcggttaaacagctctcgattgggaatcttaacaatgacacttggatctttttgtaaaacttctaccaattcacgagaagatctagtgttgtttttaatcatgtttccaacaaatagcaattttgcatctactaacgactgtctcgtacgataatcgattgtttctcgtttaagctccttaaagcgctgctctaagttgaatttggcactataaccgtgttcgctcggagtaatagggctaagaatatcatcactaataatcactgcgttctttgtcgcaattgaaaaatcagggtggcaatcaataataatgtaatcgtattgatctagttttctagtgtcataattatctgctagccacatgtatagcagcatatttttatcgactttagtttcaatgtctgcttcaatatcgtctaaatgcatatctcctgcaattagatcaatattttcattaatctgatggattttaacttgatcattctttaagaaaatatttcctactgtatactcattatcataaattcgatatgtttgggtcaaattagattgatggtctaagtcgataaacaaaatccgtgatccgtggttagccaaccattcgccatagttataggctaatgtggttttacctactccacctttaatagctgcaaaagtaataatcttcattttcttctcctttaattatactgtactcatacgttatgtataatttacttatgcttaatttaaactggtaacgcagcaaagaaacctgttgaaactaggtatgccgaaacagcaattactactacctgtgttactaacatccaacccacaaagcttttatcaaacttgttagccttatgcttagaaatagtattcataattgttccctccatattcatatgctatgtataagttatttatgtttaacttatattatatatcatatttataatatttcaacaactatcgtttttatttttataagaattcaagtgtaaaattaaaaaagataaaattgctgttttccaatgtcattaagttaagacattgacaattaagggtgcttttttagagatcgaatcatttggattcgatctctttttttgtataaaataaaggcgaaaagaccagccttttcgcctatcttatatattatatattttaaaccttcaaaattattgccagaaagatggtgttaattatgaaagcccttcataagaatattctagaacgtcttgatcaaattatcaataatactggggatcatattcacgattttattaataatcctcatgcttttaccaggaaacgcactttagatgcagcgacagtccttaaaactacaattaacatgcaaggtcagaatttaaacagtgaactctttagagcttttggcgaagatgcaactaaaaagaacgataaagtagttagtacttctgcctatgttcaacgcaaaagccagctttctcctgcttgttttaaacatattctgactgtttttaatcaaaatctatttaatattcaactttttgatcatcactaccgtttgtttgccattgatggctctgactttaatcaaatctggaatccgaaatcgaataacattgtacaagcttcttctcataaaaagaaaccctattgtcaaattcacgttaatgccttatatgatctattgaataatacctaccaggattgtatttttcagcctaaatcagaaatggatgaacgcaaagcggctgttcaaatgcttaaagctttgaattgtggtccatatattgtaacaatggatcgtggctacactagtttcaatatgattgaaaactgcaatcgcctgcctaactgtcattacataatacgaactaaggctggacaaggcggagttaaagaaataacgacattgcctgatcaagaatgtgatcgtgagatttcctgcctggtaactacttctaactattactacatcacgcataaagccagtgagaatattcaccatgtccagcatcattatcgccaatatattaagtatcgctctaaaaatacccaggatctaagctgggattttggcgagttatgcacaataaaatttcgagcctgcaaatttagaattaatgatgccaaatcaggcaaagaagaatgggaagttgtgctaaccaatcttgatcgaaaaaattatccgctaaaaagaattaaagagctttatcatctgcgttggggtattgagacctccttcaagaaattgaagtattctttaggcagtgtacagttccattccaaacaagataaatttattgaaatggaaatttatgcccatatgattatgtttaatgcaatcagtcaaattgatgcacaggcctatattccgcaaaagcattgcaagtatcaatatgccatcaatttcaagcaatcatgcttgattattcagagcatgtatttggcttcttctttaacgcaagattttgaacggatccttattcagatcagctattataccattccaattagaccaggccgcaaggacaagagaaatattaagcccaaatcagctgtatattatttatatcgcgtagcttaaaaaagcagaatctgtgctatgccttatttgttgtacgaaaaaagcaccaatttaaccaattaaatgttaaatcagtgctttaaaagtctaatattaattgtcaatgtcttaacttaatgacattgtgctgttttctaacaccttctattttttaagctttatttgtaccataatgacatcatttgtatgttataatgatgtcatagcgtaaaggagtgattgttatgacatcatcaactacaatccgtcttgatgacgatttaaagagaaaaatgcaaaagaatttagatgctgcaggcctttcaatgaatgcatactttgtaatggcagctaaacaactggttttacaaaaaaaagttccttttgaaatcttgactgaaccagaaattcctaataaaacaaccgaaaaagcaatgcttctagctgatgccaaagatgagggcttggttacagatgattcgcctagttttactaatgtcgatgatttaatgaaatctttggatgagaactaatgtacactatcaaatacgagccacaatttaaaaaagactacaaaaagttcaaaaaagaacatccagagttaataaaagattttaagaatacagttattcagttaacccaaaaaggaaaagtcggaaaggactatgaccttcatccgttagataaacgtggtggtaattacagtggtcattttgattatcatttaagtgaaggaacggtcgatgttgtagtgatctacaagccacacaagaccaattcaataattagatttgtgagaatcggaaatcatggagacctatttgagggtaaagaaaaataaactatataaatacggatatatcagtatttttgatatatccgtattttgatatacgaattagaaatttagattttattctttttaaaactccgctcaccatgttgaaaaatcgataaaaacaatgctaaatgtagaaaaaagaaaaaatcatagtagtaagactttaaaaaggacggtagaactactttaagtactacaaattacaacaaaaattttataaacttctacttcattaagaaaaaatcctgtaatacagggctttttaagctaaaacgcaacttttacattttattaattagtgattcagtagttaaaatttctctatccttatactttacagcctcagcaatcgtcagtttttcaattgctctaatgtacttctccatgtaattaaagtctaaattttttgtattacttacaactggtaatcttacactatcacttcttattttggcttttgaaatggagtcatcccaactatattttttagataaagcttttctaacacttcctacaaaatattgttgaattagagggcttttatatcttgaatctttaaaatatagtgccaaattatgactatcattcgaacaaaaatctttttcttgataagttactaccatagtttttccaccaatgaaaacgcaattgccctcatcgatccattctttaggacaatttatgtattttaaaacagcattattgccttctgctgctgtcaagtatggcacattgccattttcaaggttagctacttgactcttcaatatactatgagtattaactacattaaatagatcaactattttaaattcttgaaatattggcttatatgctaatattttcttgtcttcatcagttagtccatagtcatttaatcctgtagcttttaaataggaatcaagctcggcgagccgttgctgttcaagctcggcgagccgttgctgttcaagctcggctatatattgttccatataattaaaatctatttgttccatataattaaaatctatttcatctgcatcagttacaggtagcctcaccttagagtctctaaacacattatccacgtgtctaacaagaacagacagtaacaccttagacaatctactaaaaatggtattaaagtacaacgcaattttagtattaagtttaaatttgggaataattttccttacgaactgtcctgcataccaagaacgttctcgataaaagaaagtcatttgtaacagccccaaactaaacgtattaggttcattgtaggggacatcacatacaaagtctgttgtgctttcaatgccattattcaaagatgttcgggtaacatagtcatattcatttgtacttatattaggatttactaatttagacttgttgataccttttaccttttgtatttcaaataaatcacctaatttaaattccttatacttaaccattctgaccacctataacttgactaaccttccacgatagataatctgccacagtccttttaaagtcctcttctgcaggtgttgtgtcaatttttaaatgctggttataagtccaatcattgccttctagagtgattgtatctttaattactttatggtttcgttcagtatagtaattcgttttaggctttttatcactaacaattgcaactacttcttcataacgttctttggcatgatctgtatcacgtaaattaaccttctgaccagattttttacggttcattctagtatatccatcttcactaaaatctaagaaggttactaaatcatcttcttcatgtggtctagctactttaaatacataaatagcagtctgaacactagcttttccaccaaataaatcagttggcatatgaatagaggcaactaaagtattatttttaagaatattttttgtgtaaggcagcccgttgccactaccagcgttttcttgaataataattgccgcatagccttttgtcatttgtgacaatgcttcttgaacaaaaataaaaccttttccttctgcagagtatggaggatttagcaaaaacacatttgctggaaactgtgtgtaatttttatacagctcatgactattaccattaaccatattgctagatccatctcccattaggatcatgtttaaaacggctaaaatgtaaatattgcccagtatttctacacccagtaattgattttctttaatattttgaatcttgcactctagtttctgtttatcttgaattgtatttttagcatccttaaccataatatccattgcagacactaaaaatcctgcagatcccattgccaaatcccacacaaacgaatctttatttgtatgagctaacctagccatcatattcgttatgtatcttggtgttaaaaccacatcattttgacggtcattatcaattgatacccaatcatttagagagttcaaaattttaccagtaaaatctaaatgcaaatttgattcaagcaaaggaagtatatcattatagacttgcacatatatcttatgaatcaaactttcaccatttttaggttgccataaagcttgtttagtaaaaataggttgtaacaaagccataatcatgttaatttggctattttccgcttttcttgcatttaggaaatctgcaatatgatttaagataatttgtccatcattgtttctttcagttatgtttccttttaattcagcaggctctaactgtgatactccttttgtctgtagccccgccatgattaaaccagtaaaaacatacaatttttcattagttgtcagtaggttttgaattgacttatcgtcgtacaaagcttgatgaattgattttatccttttttctaattcatcctcagtttctaatttaattttttcgagttcacggtcatttagatttagtttgtctaatatgccaaaaagggtatctatattgatttgcttaaacaaatcaaacgatgaatctagctgtctaatatgttttggaacaccagcattagccttagaaatataataagctttctgctcaggatcttttaaattgccttcagcatctaaagtagtcccgttaattccaattataataacttcatcacagtctgagttatctaagatcgcatttccataatgcagagcaccattagtagcatatgtagtaattgcactataattaggatcaccttttttatgtggattttttgcgttcggcttagaatctgaaccaaatttagtcacttgaacaatttgaccagccttgtctaatttttctaacttatttttgccacctttagcttcaatcattactggtactcttcgtgaatgattatcttctaataataattgaatatcaggataattgttgcctgcaccaccagatttagattcagcttgtcgcaaggctgatgtaatttcactatttatttctccagttttaccgtaatgcctaattcctagactatcaagttcactcttaaagtattcttctactttttcttcaattgatctaaccattttattctcctgttcaattcttgcaatggttgattgagttgtatgtaactttttagctgattctgtttggtgttagtcctgcgtttcttcaattaatttatctatttacaatttatgcaaaaacagggtattcattataattagccttaacccagctaataacttgattcatcaagctcgtcattgcatcattaagcgaattttgggtattaatccagtcttgtttaatttctttagcttcattatcatcaagtcctacaacttcaggatcatttaccaagctatttaaattatcagtttcttttttatatctcagaagctctgacttatttagattaaattttatgagataagtcatcaacatcgattcatcaagaccaatatcatttcttcctgcgccaatcgtagtaagtccttgatccacaattaactgaatatcaccatttttacgttttaaaattaaggaaaaagatatgtcgctatcaataccacgccaatattttgtttgatagcttttacttaatttaagaacaggttcatccacctgtgcaatatcatcatatagtgctaatctcaattcatccatctatgtatttcctttcttacatgttatttagattatctatctaataccctttttatgggcaattccactaactataggattttactttttttattatatagcatgtcaacaatagtttgccatactaaatggtttttaggatcttaggcatttggtctttatttaaaactaaatttgtgattcctattggaaagtcgtcagaaagagcactaagtgtagaaaaaaatcatggtaatatgaaggtacaaaagaagaaacatcttgcatatgcgagaatattaagacacacaaaaatcgctactctgtagtccacaaatgagtaacgatttttgtgtttcaccaaagtttaagacaaaaaagctatatgcattggctaaggatagtgacgcttgtgatgttttcttgagttttgcttatggattttacgcctatggctattttgagcaaaaattcaacttttacattttattagttctaattgctaatatacttacttaatcttgacgcaatgcacctttaaccaatctgcagcaaaatacatattctcttctgaatcctcactattagtgatatataaaataaactttaatgcagcgtctttatcagcttttaagtgatatccattttcttgtaaaaaaaacgccgctgcataataggaagtccgtttatttccatcagcgaagatatgctttttagtaatcttctgtaagataaaagccgcttttaaccataatgttggatataattcacgtccaaataatatttgttgtggctgtttaacaacaacgtctagcccctctggatactgcacacctacagtacctttaccagctttttcaagcaaccgttgattcaaatgaattaaatctgttttggttaaatagatcatttattctctaactctcgtgttaattctttattttcttcataaaattgatcaataaagttgtccaaatcaggattaattgaatcaactattttaaacgtgatcttcttaccattaggatcatattctttttcaagaactgttccatcttctacatgaaacttagttaaatcttgcttggttaaacgtacactcaatgaattaccagctttaaaaactttagttgtatcttgtaacattttaatcacctgctttgccatttaattgttataacgcaataatatgatgttataacgtgaatgtcaatcttcatatactttctcctataaattgcttatcaagaacacggctaaattattgccaaggtgacttacgtaagagaaggtcaaatccttagtttcaagataaactaaagctaagacagacccacatagtgagtacaaaatggtatataaatcaatttgtggttcatgtaaaagtccaaaaattaatccattaatgagaacagcaataaacaatgttgattttttgcctggtttactaaaaaaccaattgaaaaaaatacctctaaaaataatttcttcaaaaagtggtccaattgcaatcagcattacattaataattggattcaactgttgctgatgtgcagctatgtttgcttgattagtggcttcccctttaatcaaaaatcctgctaaaatttgcaaaatacaaattactaaaaatccaagaaaagctaaactccaattttttagagtaaatcttggcattctagttttattgtaactagtaaagtgccaatcattcacctgattaagtcttctttggtaaattccgtaggtcaagctcagtaatgcaaccgttaatccaaatataaatataacggcaacccagcttaattgtttggctctaatcataaataatccttgaactaccgcataaataaggaaagttactatcatttgaccaataccaattgatttatcaagaatctttttcttcatttttaaattcctttgatctttcaatatctgatttcagagtccccatagccaaaaatcttattcatttttataaactacctctacttaacaaatttctcatcaaagccaaaatatttaaatttacctttataatctttatttggattaggcttaatctccattcgataagtacctttacgaccattgaaagctacaatttgcttttttcctgccgcaattttcttaatctcttcaggggtccaacgatgacctcggtaagttttcttaaaatgatattctttaccgtctttatatgtaatcactacatagacatttgtatctacaggtttaggattaactctaaagccccagaacctgattttacgtctaccttctttcaattcttgttctatcaattttccagtagccataaagctttttccttgcttatcagtcgcttcaaaactgatttcttcacctgccaacaagctggtaatttcttcctcactaaaaacatgttgtccatattcttttttaaatttaatctctttagctaaaggcttatagattcctttaacgtgatcagtatcttcaggaaactctactttccaaccaactctggtaatctctttacccgtttttttacttttatacgtttgttcggctaaataagccgtatgttgttcttctttaccaaatttttcaatcgaataggtgatttgttttccttctaaagcttcttgctgctccacttcagtagtcgtatgtccatcaaaaatcgtaactggtgggtttactgttttatttgtttgagtaaagactccgctaaatcgttcaattgcttttaaatcaccagctaattttttaacttgtgtatcttgctttaataatggggcattttctatcataactgctttatcatgttcaattgtcttttctgcaactgagtagactatatcttgctttgtgggatcagccttaatttcatttaaaatatcctgcaatcgtttagtgattttccctgaagataaatacgttcctttagctatgcaagcaatcaatgctccagttcctgttacttcaaatactccctttacaacttttaattggggaataacctttttattttctttaccaattgcttgtaatttactgattgtttgcattttagttgcgccagtacccaagttccatttatccaagttattcaaaatgaaagttaaagtaggtttagttgggggcgtatttgtaccttgatatacttcagggctagcgttttgagtaaaatgtgtagccttattttctgattgcttttcttcatttaaatcattttcgttaaaaatcagcttatagtttagttccttaggaacattaatcgtactcgtaaaatcaggatggtttgcaatatgggctttaacttgagtatatacatagtcctcagctaacattgctagatatgatttagcaactcgttcataaatatctcgaccacatttaccatatttgtcttcaacttcttcaagtgattgtggtactaatttggttggacgattggctccgtgatcctcactcttaattatgaattttttgcgtgggtctttatgacttaagagttttgaatcaattccaacgactgctgcaattttatctgcatatggtagtaactcgttaaaatcatcaatcgtaattgcgttgtcttctgttctcggataagaaacaatcttatcatcatacattttttgataagtctcagtaatttgttcagttgtatattccttttggaaaatcttacccaagtcagccaagttgactaactttggcggctgggttcttttttcagttgtgctatcaataataatttgatctgttgcataatttactaaatcttgttctgctaaacttttatctgaaaaacgccagctgtctccgtcttgatagtcacgcttaaacgtattgccattagcatccttatatcttatttcatagaaaggcttttttacgtatgcccttcttgctctattttgttcatcaactaagcatgtaatatacgtctgcaagcgtcctattgaaagcgccttacctttattactataaccctgttctcttgccaactcagttgcaattcttgattcttctaatcctgttagaaaatcaaatctctgtcgtgattttccttttactaaaattccttgagcatcttgttcactaactgtagccttctcaggcttatgtaaggaatcaattacatagttagctgagtcatcacctttaaaacgaattcgccagacttcattttgccagtttaaataatctactatttcccaacctaatacatcaccttcaccagacgggtcattatcgcttgcaataataattacatcatgtccaggcaaattgctcttaatattatcaatgtatctttgcttggacttaataacttgctttgaccaatttaaatcgagaggattccaaggaaagttatctaaattctgccaatccgcatatttagctgcaaggttgggggcaaccatttcattaggcgcattgagttgtaataaatgtcctgcggcataaacaatatcatagggatttccttcaaattcgccactcattccacctaaataatccgcaaatttttctgcttgagactttttttcatttaaaataagtaatcttgtcacgttactattcctttctacaaaaaagaatacctcacggtattcttcacatagcatactcattattcaaaaaaattaattaatggaggcaactatattatatatcatttttatgatatttaaaagcttagtaaacctgcttaatgctttccaaaataactttattcatttgactaattatctttctaaagtagttgtacaattgttgatcattgttacaattgaggtacttagaataccaataaaagtcgattcccttattttctaatctttccttttctttttgataaatcttatcactaattacataaccataatttttaatccaatcttgattaatataagtaataaagtcgcttgcctgatcatactttagtttttttacgtcaaaaccataattaattaatttctttttgatcacaactaaattatcaattctgttaagttgagctggtttaactaaatcaatcacataataggaattaaacaaacctcgtaattccccttctttattaggtctaacaacgttgaacaatatatcttctaatcttgtgacttctttcataactgcctattatttctccttaccataatataagcatctcatttatatcatatattgaatttatagcatacgatattgcactaactaaaagaaactgtcaaatcttttgtgtaaatagttctttctcgtaaattgattttttaattatttattcaaaataagattctaaggtatcctgaacctgaccaaagcctttatgaattcggttgaaatagcggtcattgtagctcattgcctggatgccaataaatgcatcaagcgactgttcagttggaaattctgccttaggcttagctttacgcttgatgacgttgttaaaggattcaatcatattggttgaataaattgaagctctgatttgtttgggataattgtagaagaccagcagatcgggctcaatttccttcaaacctttgatgacatggctataagctttattccatctggcatagaatttgtgcaagacagctgcagcttcttttttgcttgtctgttgatgtatctgcttgaattcgttcatgatcttttcgcggtcatccacccggactttagcacagatattgcgcatgacatgaaccaggcagcgttgaaaatgagctttaggataagtcctggccaaggctgttttcatgccaacaacaccatcagaaagaaagagttcaacttgcttcaagcctctggacttcatgttttgaagcatctctgtccagacttcaatgttctcactaggagcaatgcagtagtcaatgacttccttatgtccattaggtttaatgccaatggcaatatatactgcttcacgctcaaacgtttctcggcgcaaaggaaggtatgtcgcatccaaatagacacagaaaaacttgtcgcttagcttgcgcttgtgataagcctcaaccttggggagcatctgcttggaaatatttgatacttgagctggactataatgactgccatacattttctcaatcaagtcagcgatttctctggtagttacgcctttggagtagagcttgataatcgtgctttccaaaacatcagagtgctgcttgtagtcaggcagcgtgtgctgatgaaactgaccgttgcggtctcgaggcacttgcacttcaattggtccaaactgggtatcaaccttgcggaaataagcaccatttctagaattgccagtattccagccatttctggcatagggatcatagcctagaaaggcagtcaactcagcttctagcaagttattaacagcctgttgtagctctttgcgcaataaatcatttattttgtctggattgaatagagcttgagcaaaatctttggtaaaatcattcatgaaggagttcttctttctgtatgtgttttttttgttcaaaccaatcatacgagaaaggaactcctttttctaatgtttaaagaaataaatttaaggaatcattcatccttacacaaactattttacagtctcaactaaaaaaataaggcaccagattatatattgttgcttatatattaagcataagtaacatatatactaattataaacacgcaaaaaacagccagctctaaatacaataactttaaagctggctgttttaacataaaattattttttagcggttttacgaagaaacttaactaatctatgtgtgtcttgatcacttaatctacctatataattaacattagtatcttttttagataccgaataacgtctataagtatcaatccacgaatgttttttcaaacctgtagtttcatattcttttatttcgaaataatgctttttaattttttcggatttattcttaaactttgtcgttatgtcaaagaaaaagaacttatcctcattttcttgtaatatgaatattggtcgtcttttaccacctgaaatctgaacgaagcgaacatatactgtagcaatatttttactcatcttttgacatccattcttgcagtttctcagggctattcaggtcttctgttgcccaatcttttgttaagttttgaatttctaattcatctttctctctttcagttaaattggttgagaatggtaacccattctcagcaataagacgcttatagaacattgtgatagcaatagtaggtgttaaacctaatttttttagaacagcattaccttcttctacaacaccatcatcaatttgtacttgaattctctttttagtaattgaagccatagtagtgcacccctcatatcatttatactgatattatactactaaatcaatggaatcaacctatataagagtaatatttactcaccacttgttcaataaattactaactgctttgcaatcctcatatcaaattttgcatttttgatattttttaacgatctaattcctgttcacctttttgaatagcaatttcttttgctttttcattggtcagcgaactgtttactgtagcaacatgtggcttgctagtttgcacttctttatcatcaagcaatttagacttttcttgatttttttcaatttcattttgtaaattgtcggttaacttgctatagttgccatctgctgtccagcactgcgttttattaaatgcatcatccaaatttctaactgtatctattgtcatacttttttcgatttttcttagtgccgtcaattcggtcttaaaattagttccattagtctcattgtcagtaacttcttgctccattttttctttttgcacataccattgcgagtgttcaggagtatctaagaagttttccttgacaatttgacccaatttttcttgttctttttcgagtaacttatcggtactattagttagtgtcttagtagctgaaccaacatgcgtcaaaatttgcccttttaccccacttggtaactcattaaacttttgtccgttgcttgtccaattagctatataatcaactgtctcttgcttaacatcaattccataatgagaacaataaagataacttgtaagctccgcttgcatctcttttaattctctaggcagacccttttcttgtttttggctattatgtagctgtgcatgtcccaattcatgagcaagcactgatacattctccgttggagtgttgtatccatttaacacaatttcgttagtagccctgttaaagtatcccttagcattttgcggatccttatatttatcccgaatatctgcattaaatgggtcataagtaatgactggcattttcatgtcattagctacacttcttaatccattctctaaggagtcaatctgtcctggattcttcatattaaaatcttggtgtctattagggtaaagttctgggtatttttcctttggcatattggtttgtggagcatcgaatacagtgccaatcttataaaaagttttttggtaagtttctatattacccgcctcaattttttgtttttcgtctttagtggcagtctttaagttagctaattctttgttgccatccttatttttacgatagaaaactgtagctttagtaggaacaaatattttaattcctttttcacctttgttgaccttatagcccatgcttttaaactttgcaaatgatcccaccgcagtcgcacctgggcgctgcatctgaatcgtcattgcatttcttgaggaatagttatgaaacttatccataaaatcaagcatttctataactttctctggtgattgagtataattatctacttctttaagtagtccattttttaaatcctcaacggtttgagtatgtttctttttccaagctttacggtcaaaagtctttctaggtcgtctttcagactttaaagcatttttatccatatccattttatctttaacttgacctgatactaattctggttttgatttttgaaggcgatcaagatattgtgactgaagtgaaatatcatcattaagactcgatatctctttatcagttaatggtgctgcccaatcagaagtaaaactagatttattccaatctacatctgctaaagttccactttctttttcactatcaataactttttgagttagtggtttaataccatttcgattaatcgtgtgccattgataatttccttcagcgtttggtgaaaaaagataatgatactctacatctgaattaagatacttaccgtcattctttgatatatcattaatcatcgcagataagtcatgatagttttttctagcaggatcatcgattctttgtccattagaattatattcatccataagtttagtagcagctgtaggattttctggaatatggttatcgttatagttccctgtttcaattaactttttggcatcgtctaaagtacgataattatctagtaaattttgtcctgtgaaagtaagtccaccatccatatgaaaatactgagtagtaactgaaccatttggatttaaaattgatacatttgatcgtgttgacataatttttcctttctaagaaaacaaaaaagacgcttcataatgaagtgtcctgactacatacaagttatttagtttttactactatcaccttctttctagtaattttaaatttacacgtttctgctgaagataatttactgtcttagctgagaataaaaaacgctgaagttttgataattcaatgatttcagcgttttttataccatctatttaagccttggtgcgattctttaatgttacctatctaattcttgattttggtagaatgatttaattcttttagtttttaggtcattaatgtcaatatctttttgcgaaatttcgttgctcaaatgatacgcaacttcgttcttactaggtaaagtttctatcattcggtccaaagctttgtcttcttgttctctagtatctgcacgataaaatctcatgaggctaatcataaattcagcgtggtctatgttgtcaaaaggaagggttaaataatctctggtttcccaggtatctcgagcagagtttgcggcaattagcgctgttcttttatttccgtcctggaatggttgaagcttggataagcttgcaaatactctccacgcatctttagtagtctgtttagacgagttgtattgttcaattatttcatctaagtcttcggggtagacgttttctggagcaaagtatgcacctttagctgtgcctttagggtctgtgataatgacaattgcgtcgtctggattataacttacatgtcttaagcgccctggaatacttgggtcttcttcttcgctatgggtaaaggctttattaatttcaataattccttgtcttgtaaatccgaatttctttgctgcagctatgccatctaaagcatcttttaagatggcaccatcgtggtgttgatgtacaagcttagataggtcattaagatctaaggctctttttgtttgcaacacagtactactgtagtcattcatactaccaaaagagactatgaagtttgcaaggtctagtttttcactcatttgttctcacttactttccgtttagttagattacttacaattttagcactatttaattaataatccttgttttttgagcggcacatacgcaagcggtatgtgcttctttttttgcattaaattagcagctagtcactgactaactgctttttctatatgcttatctttctaatccttggtctcttctcaaataagccgatcgcttttcaaattcttgtcctggtaatgttctggttgtttctttagattgtgcttttccttcttgcattttccgaaaagcttttaaggtgtcattccaatctttacctaatttttcactaggtttacagtatttaactttaggaaatttagattgaatatctttaacaaatctttttccagcttcatcattatctacacctaaacctacacttttaagaattcgaccttctttttgtaattgtgctgctgtttgtgttatatacgagtcaaacacttcttttttaaggccatccattgaaacaaacctagtatttttcattccaccctttacttttaccttagacaagtcaaagaaactaattgcatcaattggtgattcaaaaaatctaatattttctggagtttttccattcatacctggtgaatcgaatgaaaaaccatatcccttggtagaatttttttcaatcattttgagggttcctcttctaccatatttttgatgattaattttggtaccttgttttgatactcctttaacttgtcgtctatcttgaggatcaagccacaaaaaaagtgcgttacctaatttatcttgtgcaagcactttatctttgtgtaattgatctattgtcttacttgaaattccacgctgattatgtaaatatccccaaactcgattaattttgctttcggggtctaactgatttttatcaaacttgaaaggttcttttttaatttgataaactttgccatctcctgcgccgctagttaataccttatccattgccttaagaaacttttctttttcatttaaattgctaccagacaattcatataatgtagaaaaacttaatgcaccctttccatgaacctgtcttgaattccagtaaaacgaattcttagatggtgtaatcaccaatgaatcatgttccactcctttaaattcatcactacccgtttgtcgtaaagcaattcctgcacttcttgcatattcaacaatacttgcagaatttgctgctttaatttgttcttttgtaaaagcaagcatttcaatttctcctatctttaacaataaaaaaacaagtagtacaaactacttgctaatttcccacctatgcccgactaatatttttagccaataattaagatgatcttattctaattcttgctcaacttcattttgtaatttttcaaactcacgtaaattctttttagtttctttatctgcatttattttttcgaatactttttcttgattcgattttatttttcggatttgactttgactaataaaaggcttttttaaataattgtgtcttttgaaagactttttagactttgcacgcaaatgtggtctatatgaatcatctaattttgacttttgttctgctgcatccttccgaatttcttttaatgcagattgaatgtagtcatttggatcaactttatctttaaaactgatcctgtgtctttgattgtggtttgcttccttatcgatttttcttaagtcagcaagcaacgcattaccatttcttgcataaataccttctttgccatacagttggttgattgcataatttttattttcacgtttacttttaccgtataaagcttgtcggtcatcctgcattttccaaactaaatctttatatctttgaaagtcggaattatcctttaacaattcatcaaccaaatgatccgacattttttgttggcttttatctaatttgttgtaaaaccattctcttcttgactcaggcaatgctctaacaaattgatttatctctgcttgaaaagttggctgttcaacttgactagtcaaattaacctgaattgcttctctaatagcttgacgtctctgagataattctttagtcatctctgaagaaccaatcaactcattagcaaaaccacttttcatatgatcaattattttttgtggtcgcctacccttaggttgactaatcccttcacggtttataatttttcttcttgggtctttctcaactgttgcaatgtgaatatgaacattatcagtatttctatgaatggaagccacccagtacatctcatttaatggtggatccatttccttttgaaaaatactctgcatttttttagttgccttttgtagttcttcctcatttaatattccagttgtactagataaaatccccttcttttttaaaaaactattatcaaaactaacaacatcttgccacaagacagaattattctcttgtccttcatttaattgctcacgaatataatctaaatctttcaactgaacaatatctttgtcagagctaaatactccatctaaaactttttctttggttggatgaatttcactcagcttacttgcagcttgccctattctttccaattcagtttgttctttggtatttagtcccgtttcgttctttttctgatttaatgcatcaattcgtaccatatacccaagatacttatcaaattccttatcattcaaatcaaaaaaatttctcttttccattaacttttcagcagctgcttctcgttcagaatgttcttcactttttactctagtaaagttgttttcctgatttaattttcttacttgttttttaactcgacttaattcatctttttcttctgcagttaaaaattctttttcttctaatgcttcttttctggctatatatccaacgtaacgtccaaaagcttttcgtgaactcggcacagaaaattttgaagttaaaattatagctggtcgtcccaaaaattacctcctacaaataaaaattctataaagcaagttgattaataattattttgctctttcaattttaaaagccgtagaatcgcaatctcagcatcaaaacttactcaagttgtccgccattttcctccattctattattaattctttcttttacttttctctttgcagatttataaacttctgcatcaattccatttccgacaatttgcattccttgagtcatcaaaaactcacttaccatttctgttagaattgcaacttgttctttggtaaatcgctgttgttttctaatatcacttaaatcttttgtccacttagaatttttttcattttcttctgctaacttcataagatgatgaattacttcagcattattttttaaatcgtgttcctctttataatcttgaatccaatctaaatctgtatcagaaattgtcgctctaaaagttgtcttaatcattttttctggtcctcttaatcagcgtaagtttcttgtctttttttcaaagcattatcaatcttttgattaattttttgtaactcttccagttctttttctttttgaacacctaacatggcattgaagaataagaacttataaagttgaccattattatcaaagcaatgttcttttctaatctgcctaatttcttcccattgcttatcgttgagtcgaaattgcaaaaagtgctgtcgtcccatttcttgccctctttctaaatttaatcatcttcttttgccgtgtcttctgacaaactatctaacaaatttaatgctcgttcggtgtcattaacatctccactaatgaaatactttgcaagaacattcagccctaataaattttcctgcagaagtttattctgcttctgaatcaataaactagtttgcgaatcttcattttgattttgaaaattaattggaatttgttcaatttgttctctcaaaaattgatttctggaaattttcttacttgaattttgatttaattgattaacaatccgatcaattctagccaagttttgttcgctgattccacggattaaaacttttaccataatttttctttcctctgatttctagtttctagttttccttctagtttctactctgaaatttgactaaaatctgcttcttttagttatctctagtaaagagcataagggaaatctgaccccacgccttttataaaggtgtgctgggcttggttgtaccaagcgatttcgcatttttagaagtgatatcacttctgattaatttgacgtctgtatacttctaaattgttcgtcttttacctgacattacgtcttgatacgtaatgttttttagtgatatccgaacaggacgtattcttacgtagctcattacgtccaagacgtaacattttttagctaaattttgcacctaattatcaaaatcaccgtccttaatgtctctgattgtgtcttcatatttagaaattgcttgctgactttgtgtgatagctgctttgttttctgaaatatcattttccaaactactaatttgtgtttggtaattttctttttgactatcaccaactttttctaactttgcctttgcagaatctaaattattttgagaattttgaatcgtagcttgagcatccttaattgtattttgttcttgactaatcttctttttattccaattaatcagatattgacgataatcaaggatatagttttgatagctcttagttactttgcttgaagtcagatcaaccttattctctttaatgaagaactcaatataattattttcagagaaatcttgcatgttaactcgcttattaactttttgtggcagaatatcaacctttaaatctccaaagccatttttgattccgctaacctcaattactaaaaagtgattattgattttctgtgatttgatcgcaagctcttctccatcttctccgccacgtgacatgtttactactcttatagcatactttaagttgcttaagtctgaatcgtcactagtagatgttacgtctgtagagtccccaagataatactctagcaacatcttttcgctttgcttattgtaaatagaatttgctaggtaaaatgatgaattgcctgtcactacattaacagtttgctcagtgtcaattgattttcctgtccaatagggactagcaacgattgcaataaaaattgcagccaccactccaatgaatgataaataaattttgcgatacttatgtttttggtgtcgcttcaattcatttttgtttttgctttgaatcattttttgcctttctaattgtcatccgaatgtacacgatagtttttgctatcatttaattcctgttttaattcagtaatctgctcctgttgatctcgaatttgtctttgactttctgaatctggattatcacgattaaagtaaactgttgccattagttgtgctgctgataacaaaaacaaaactaaggcaactaatttcaaacgatgatttgatttttttagtttagttttttctgattgatatacaattcgactagacatttttaatcacctcttatgacctgatctatcttttctatgttagttcccgtatatttttctacttgttttccatactttaaatggataaaagttggtaccttagttaacttatactccgtaatatagtgtcggttttgtggttgattagtatttacaaactgtatattctttctaaataaatcttttttcattacagcgtatgaaaaaatagaacgacagcttttgcagtcatctcgataaaataaaactgttgagtcatcattagttttgattttaacgatgtttttttgatttagttcatgattaacatgttgattaaaaccaataactcctatgaacaacaaaaaaatcattgcacaactaactgcaatgatttttaccttagtttcttttttcggttgcatcttaatctgcctcacgatcaatttgatagcgaccaaaatacttaattgaagtaatttgattagtcgctgtatcataaatcagctggtaagcatcagttggtgttcccaaagttctatcatcttttgtcatttcaaaataaactttggcatatacaggcacttggttattttctaaaatacctgtcttcaaatctagttcatcaatctgacctgtcatatctgccccactatattggagctctaattgcttatcatttttaaacatagaattgttctttaagactttttcacttactaaatgtgtatctttcaccttgtctggtatttttaatttttcatcaccactatcatacgtgtaaagcagttttagcagtttacttacctgtttcttggcttttgtctgtgctacatcctgctcagctagtttctctttgctgcctccttccttcatagcaatatgcttttgcgaatttccaattttagcatctacattttttaactcatcttgctttttagccaactcagttcttgcctgatcaacatgatagtcgatagctttttgcttgttagtctcataattgattacgcctaattcgagcatgattccgaggattgctccacctaaaagatattttttattcatcttagttcctctctatgttgatttctttaaagctatttattctttgggtcttaagattataatcaaagtcccaaccataagtaacttcttttttattggcactttcgactagggttactactgtaatcttagtatgacttacatctgttaagtcaccaaagtaaaccgttgtactcttgtttcttaaataaccataagaatctccattatttttgatgaagtttttgccctctttacctggaaaaatttttgtccaagcactaaattcttctttttgtttagctgacgaaaattttcttttagtatagatagctggtatcacttttagaaacttgtcacgtgcctcttcttctgcactcaccacatcaaacttttgtttatatgcagaattctttgtttgactattttgctcttgaactatttgcttctcaacagttttaatttctgccctaatatcattcagttcatcatttttaggaactctggcaattgcaaacattcccagaacagcgaataatactccagctgtcatcatccatactttcagattggactctcgctcctttttctgctgcttcatctttatccttctttcttggcattaataccaggtatgtttcatccagaatttttgtgcattacgccatgaaccatatctgccttttacatatttatttgctacccttgtttgattcttatgactgtaatcaccattaagatattctctctttaattgataacgtccataaacacttgggttagctgggttaactgcgtcccatctacctccagattctctctgaacaatccagtcacgtgcttcagattcagtttttgataagccatcatcttcttcagattctgcatcattgttcaaaccatctttaattaatttaattgggtctttccaagtaccatcatctttgtacgcagagagctctgcggtagcaaaatctttttcagttgcaccaatgtgaacgtgagtaataccatgtgcattacttgctaagtgacctattttatctcctactgaaactttgtcgcctacctctaccttgacgtatttcaaatctgcttcatcaaagccgaattcctgataaatgacattccaaccgtcggagccttctacccaaacgtacattcctagaccatcttgagtatgtccttgaaatgcaattttcttaacggttccaccatgaattgccaaaatatcttgtccaccatatggaacagtaccaaagtcaacaccatcatgaaagccacctgttcttgtagatgacttaccaaataattgctcacctgagattgtattacctggtccttttttaggaattgacttgaatggccacccccatttgccgcttattggcttacaatcttcctcagctgaattatctgagccactagacccatcacctttagctagtgatttattgcctttcaaggcatcatattttttagcttgagcttccatacctgcttggtaatcactttcagctgcggtatagtatcctgcttttttcattgcatgagcatattgagcaactgtagcatcttttcctaatccagcttttttaaaaccattctgaaccgtcacagcccactcggtcgcaaaatcacttaagttcttgtagtgaacgtaattaccaccttcactaccacggctttcacctttggtaccgatagtgcttccttctgaataagtcataccaccaaagttatgatcatgtttagcaactgaactatcaccattacctgtttcctgtcccatttgagcaaaaagtaatctagcactaatcccagttttctcatgcacagcatccgctatatgcatcatagcggtctgtccatacttaggtgattcaatgacactaattcgtccttctactactcctccttgttctcctcctgtatcacattcatcatctgtagcagctcccattgctgcaattaaaattacaataaaatatataactgataaaacagctaaaattcctaataaaaaagcggctaatccagcccatctttttgtctgtcttaaccgcttaatacctgttatcattattgaccacctgcaaaaatttcaagttgtcgttcagatggtttcatcttgacttgatatctttctcttcctcccatcgtgacaattgcttgtcctgtttgcaagtcaggaatgttactgtaatctgaactatttaatgcttcgcctaatagacttttgattttcttaagttgagatggatccatactcattagccatttgtattggcaaagttcaaaaaccacttttaaacttgatagttgagcagattctactgaatcaggaaccatttcttcgggtgattgtgtcgcaaatataatacctgcattaaactttctcatttctcgttcgaagtttttaacataatcaaccgcaaaaatattttcataatttatgatgttatgacattcatccaggaacacatcaaaatactgtacatcttgacgtgtgattttccctgcctttaacagagcattctgttttctaccatttatcaatgcatgactccaaattaaacttagagccatatacaattgtgcctgataaacattttgattcattgttgaaatagcagaagaatcaaatagtagaagcttagtatctgtcaaatctctcattgtagaataaccatcaaataattgaccgtaattctcaatcattgattccaatgctaccttgattttttcataagttcttattctttcagcagtaaattgatgttgttgatagtacattggcgtagccaatttttttagccaatttaaaaactgactaaaagtcgggtatttttcactatctaaattagtaatttttatatttcctttattttgttgaaaatttctaggtaataatcccatgtctacataaaatccacgtaacaatgaatcaaattcttgcatttcaatatttacaaaggatcccttattaatcatttggaatagaatatctaccttagaaatatgttggtaaaaacttgctagctcatcaaccttacctgtattttcatctacagtagttgccattacttcaagtggattaatcataccttctgatccatccaagctaaccacggttccaccataatgcttaattaaaggaatatattccttagtcttatcaattccacgaaagtacatatttctagcaattgtaccttcaaccaacatcttcattaaagttgatttaccagcacccatcttacccaagatcatcatattaaacgatcttctgatattagttgatctaaattgatcaaaataaaaggctcccccagttgaagtacgacctaaccagactcctctagggtcctttaagctttgagctgaaaatgggtcaccagctccaaccgttaaggctggaattggttgttctggcaatgctgctaaatccttttcttgctctgtgattggtaatgccattgatttaaactgtttatcttgcataaacatataaacagcaacgttataaccctcgcctcgaagcttgccacgaagattagaaactgattgatctaatgcttcaatcgttggagcatatacaaagattctggttagcattaatttgggaatttcgccaccttgacttaattccaatgcatatttttccaatgattgcatatctttttgtgcatttaaagcatcagtggcttttctagcattaacttgccggtcagctaattcttcaattgatctattcaattgccgcttaatttcatagcccgaatcagttttaacgtcaattgtagttaatgttgaatcgtttaatgacacttgagtaagccagagcaaaagcggatcattaggataatggattacagataaacaagcagcatatccatcacttgcaattgcataattatccgcaaaagtaataccgccctgcggttgtacttctgctagaaacttagtattgtaaccattttttagtaattctctttgctttttcaagctggtaacttgtcttggatttagctttacagttacctttttcttcttgtgtctctttgttttcaataaactagaaattctcattttttctcccttacttactattcaagttgttttctctaaagagtactttaaccgtttcttcatagtccaatggtctcaagcccattaacccttgatcagcaaattgagcggttctagtgttaactctaatatcgtgcaaatcttctccaaaaatcataatgtaaaactgcacatcagagtaatcttctgtatttcttgacagcattactgattgcaacaacatttcattaactaatcgtaaacgcattttttcatatctggttttgggtgaacgaatcccattctttaaatggcgaaaatactgttgttgttcactagtatcaattctcgtcgacatgactacaattttataatcgttgctataaatccgattaaatgtagtaaatgaatctaggtatttacttctggtttcatcatcaagtgaatataaatctgtcgaatgtacacgcaaatagcgtgcttgggtgccatctactaaatcaagtatcccgtcttttgagcagttactatagcccaagtattcaactattgattgatctcttgcatcttgtcttgatcctttatctaagccaaaagctctaaacaagctaggagctttgctcctactgtttctactttttctttttgttcgcattattttctccttctaaaaataatggataatatctgctttggtcttgtcgcataatgcttaacaaaacacgataatttctaatctttggcgctagaggggttcgcattactagcagaattcctactacaactccaaaacctgtcattactaattgccaagtcggttgtaaattaaatagaaaagaaatttgttgtcctgccatacccccaatgaaaagagcaaaaacatcaaacatatctaggaaaaagatttggatagatacattagttgacttaggaatcattattttttgatatttatccatgcactaatcctttcttctgctatctccatgacctaatttgccaatgttggtagaacttggtgatttagtttcagtagagttttcaacttgctgattgattgtggtcttatcatgcttaatttcagtcaccgtgttagtattgccttgagtttcaacggttctattagtgtttgaaggtacgctgctcttcatagcatccttcacactactcattccttgattgcctacatcatgagtagatacttcagttctgccagcctttctttcaatatctacatggttggtaccagcagtttcagttactttactatgactgtcttgtcccttaaagtctgaaacattgcttaagtgtctaccgccttcaccaactggttttggcggtgtggtttgttgatttgaacgttgttgacttgccaactcactagtggatttttgagtatctctcaagcttggtaattcatcgaccgcattactacttgttggtgagcttgaagagctatttgcttcaccacgctttgaacctgaaccagtaacagaagcactgttagttctaggatcatttgctgtttcttttttaccagtctttgaaccattagttgcttcactaactgtggtatttggaatttttgcatcattaccaattgtcttagctccacctgttgacttaatagagccgtcagttgaactttccttagcagcatttgatttaggcttgctatcatcggtcttaatgccttggttttgaatattatcaggtttaactgatgtattcttaccttggtcatttacatttttagctgaatcaacattgcttgttgcaactgtttctttcttgccatcatagtttggatttcctacaaatgaagtatcacgtccaatacctgttggttctgcactgccaccattcttttcagctctgttttgcatgtatggattatgatgtaaagtgttgtactgattatcagttaaaccaccatttctcatcattctagcggcttcatcttgtacagtttcagatacagcgccagaatttactgccctgttccaatcaactgcactgccaccattctgcttaaagtcgttatgagctgaacgaaaggctcttcttgcataactgccagcttgttttgcttcactattgcttgctccattttctttagcaatagccttagtagagctaccagcttgccaagcttgagcttcaccaatcgctgcccctgctaacttaccagaacctctggcaactccaacagcgccttcagctaaatttttacctttaccagcaatatattcagttgctgcaattcctccagcaactttactccagccttgcttaagtccagtatccaaaccaaagaatttttgaaccttgcttgaaccttcccaaagtgcccaagttaaagcaatcattccaactgcatatagataaggattatcatgaatctttcctgcatctgatgaactcatccacacagctacaattctatagaacgctaattcaaagccttggaatgcaattaacaacgctgaactaaaaatatcttgtaccgcagctttagtacgctttccagtttccaaatcagtggagaaaataatgattgataatacttgcataattgccaattccaagaatgctcttactgaaacaaagcaaactagtaagaaggcaactgtcattgaaaataaggcaactacaactgggaagaattgtactgaatatcgttcatacccaccgttaaaaattttgaaaaaggcagtattgctttgacttactttggttgcataatatcctgaatatgcttttccctttacatttgatttcgtaccaacgcctgtaggagctaatttataacgcaaattgtcagggtcccatgctggtttttccttagacttatttgctttattacttaatttctcagctaaatcagctgaaatagtagttgataaatcgcctgatgttgcagtatcaaaatcagacttgttcatagcaaatgaaccatagtgaacatctttttgtctctggtctttaatttcaccatttttatctttagaaacaccttcccatttggtattagtatccccattattgattttgaagccactaaaattattagctatgattgctaataggtcattagaattggcttgtactacctgatatggcaagcttgacgtccctttatcattatcagcctgtacaaagcctttatatacacctgtagactgatcaaccacccaatttgtaattggctgaatatttccgattaagaacgctgaaattgctaattgccaaacgacattttttaattgaggagctttacttgaggtaccaattttaattccgacccaagttaaggttaaaatcatcaaccctgcagcaattcccattaccccattaattaaattagtgtttaaacctgtggattttaagattcctgagaaatccaaactatctgttgctagttcacttgcccaattggcaaatccataaaagatcttaactataccccattttgtctgattcaaaatacgtcccaaaaaatcatcataatgtaaataaggtgccgcattttgtagagcttcagttactttttgtaatttggctggatcataatcacctgaattggttgatttttgccaccaatctaccaaactactaaaaatatcaagatactcaggattaatgaaactagttaaatagaataaccaatttgtcattaatttttcctttctttaaacaaaaagataagtagtcattatcgctacttatcttgataatattcattaaagctttggctaaattcctgtgttaactcattcttttccttgttcttatcttctaattttttatctttatagatgatattaacaaaagctattgaacttggtttttgtccttcaggcacatcttttaattttgtagcctcgttcaatattgcttgttttgttccatcactaatatcaccatcatgttccgttaaccagttcgtgataaatggtggaatctgattttcttcttcctttaaagacttcttcatttcttgttcttccttagcatctttagcagctgcttgaacatttgcgtcactttgacgatattggttatatgcctgcaaagccaaattttcttcttctacaaatacatttccatcttcatcttgtttggtaacttgttcagtccaagttaaccatttgctccaatcgatttctaatgcttttaaattaatattggcatgtgcatcaatcttttcaactaaatctggattagttttaggattaaagtcatcagttaagaatgtatgtgcaaacggcattaatgtttttcctgtgttaaaaataggatgtgaaactaccgcccagccccatttattcattcttgttaaaggtctcaaaactagtctttcaccgccagctaaatgttctaatcgttctggtagtatcaacggcactttatctacgctaacactaacatttttggctaaaccattttgatctttagaaatattgcttgtctcaatcgttttattgccacaagcttctgaaaattctttgttagtagctgaatcagtagacataatcaaacatttattctgacaattttctttaataacttgtccgtcttctttgccatacttactgtagagctgggcataagactggataactaaagtaaatagaatattacgacctgctgaaactgtcataatccgatccatattctgcagcggaatcatactaccaaactcatcaaaaatacattgtactcgtctaattgtacttccaccttgaaccagccgacactgacgtgataattctgtatataattgattaacaaaaattgtagctagcaagttgtttgaagcatctgaatctggaattttcataaagactgcaattggcttatcactataatgcatcttaaagttttccatcttaatttcaggttttcctacctgacttacttcaacctttttaactttaggattaatctttaacttaaaagtattcttcaaacgcttatgtcctgcaatagcttcaatttcaacaaagcttcctgtttttagattgacatcaaagttgttttcaacaaatcctttttgactaacacgaatctcattcgttttcagttttttattatgattatctctaaaattgattttaattaactcaccatatagtcgttgatcaagcaactgaaactccaaatattttggaaaaccaattgatttcatttctagtgtgttcatactggtcatgcgtgagtttttcggtaaagtgaaaatatctagtttctgtacaacagttgaaaaaattgagcctcttgccttatcatctgagaaatttgtggaaccgaattcttttttagcaatagatccctgttccaaatgcttaaagtattcacttaaaacgttgtgttgagtatatggatctgatggattagtataatctatctgtcctaactgattaactaaatcagcgatatttacaaaagtaatatattctggatgggcttttttatctctaaagtttttaggattcatgcaatactcaatcaaagcaataatcataccaaattaagatactataatcataggtcatcatagacagtaagcacgcattttttatttgttgaatcatcataaatcaaaaatagtaataagcttttttccgtaaattttccgcaaattacgtaaaaacagaaatgggaagaaccaactcggttcctccctttttctgtattcgcaatgaatagtcgtgcagtaatataaatatattataccacaagaaaaaaagccccacgaaattaaccgtggagcaaacatcaatataaatcaaaaggttcaaaatttgatgttatctcagaagagatgttaaaaattatatcatgagtaaaataaaaaagccaccctgggatttctcccaaggtggctttcttgatagatttagaggagtatttcacccctcttcttttatatttcaataggcaatttgattataacacttttctaggatcttttttaccagtagcatgttccataccctcagtggtaacaacccattgctttccaaacttacgcactgttccttctggaaacttttgaggtgactgactaatggtctttctaacatagctctctgatacgccccagattcttgctgcttcttttgcttccataatatctggactatttaagttaatcactagaatgcacttcctatcattttaattagtaatcctaatagaatagcaactacactccaagctaaataacgatgcattttttgtttgtgtgtcatggtataattagatatgtcaaagagaggagcctctcggattccctctttaaagcttacttgtgtttgacaagtgttagaactattcgccctagttgtttgataagttcgtaggctggatagctccaagctccgatcatcgcatacttagcgatcttttcggaagtctcatcacgagtgggctttttctttttgccttttttctttgacatatctttacctcctttcacttattataatatcacgatatcgggataaatgcaataaaaaaataaaattaactaaaatatatttattttgaacataaaaaaagctcttgtgacagcagatcagcaagagccaagcaccgactagacggctagacacatgcccaaagtaaccagctttggggctttaaacgaaagtgtatcctttcatgtccataacagcttttatggctactactttttcaagtattttagccactgtaattgcttcatggattattaaaaagttcatgaagtaaaaccaggagagcaagcggataataccactactctttttattataccataacacaaaaaagagccgctccaggaaaaatctcccagagcggctcttgcggcatttggagtgttcttcacactcctttttatatttcaatcattattactatagcacgatgtaggcacgattgcctgtgacgtagacggtcttgccattgtgcttttctttgatacgtaggaatctgccgacacgcccttgaatctcaacttttgagttaagttccaagccgtagactttcccagcgtctgcctttggtgcatctaaggcgtgagtatgtggcatcacgatcttggcaacgccatgtttggcatcgttgtatgcgatcgggttagtcttgacatagacggcacgaccatcgaagtattggttcttgccaaccttgacagcgccgttttcaaagcctagcacctgccagacagaaccacaaggttttagcttgtcactttcacgcttgtctagctttgagctggtataaacatatgcaccttttgagttgcttactacggcaacagcgccaatattccacttgactacgggatgctgagagggcgattctacggtcttgtttaccttttttggtgattgattacccgaactgatctttaaatcgactagggtaatattgccatcaacgccaagaccacggtagttatcagtaaactgccagattgctacgccgtccatagatgggaaatagttaaaatcagctgaatcttgacgacccatgaccttatatgaggctacccagagacaagttccgaatgatttaacaattcggctggtgctcaaatgatttcgtaaattgaaagcacctgaatagacaagtggcttgtatcctgcttctttgattacctgcattgcggcaagaacagcatcggtgttggcactagcaccgccattgactgaattgccagaaccttcttcccagtcgtcagcgatgtagctaccagctgggactccgtaagccttagccttttcaacggcatacttagcttctgcccgtgctcgtgtgaccgagccggaatggttggcatagaaatagcccatggttagcaagccatgagcctttgcagatttaatttgcgcttttgctttcgggttgatgtatccagtaccttgcgtaagctttacgatagcaaatttcgcacccgtgtagctaacgttttctttctggaagctggctacgtccacaccatagcttttctttgatacgattgagcttgacatctttttcaccgcctttcgtttggttttcaaacgatttgtcaaacgattcaaaaacgtactcgttatacgtcttagttcttgtcatcattgtcgtcacctgatacaaagccaattggttgggcgttggtatcttgtgtatcctcttgtttggcttggtccgctgtcatttggtcataagcatgttggacagcacccttggcgactgtttcggtcactggcttgttttcttgcttggcttgatcaagtaaggcttgtacagccttgaccttcttttcggcaccagaaatatccagcgttgcggcttcgcttacgacaaacttagcaatctcatcaatggtcattacttgctttggaagtggtttagccgactttttggcaaagtattcgatactagtagagataccgatacagatagccacgatagccaaaacaactatttgtgtgtaagcagttaattcagtgagattcattattgggtcaccttcttagtagtaagtacgccgctagtgatgtcgcccgtcttagcaggggtgtagcctactggcttatcctctaccgctggcttggttgcgtctgggtccttgaccatggtttcgtcttggatacctgacaaatagcgcacccacttggtaactgcacctttgatgtcttgtggcacatcgtccaaggttaaaacaccatcttgcacaagagtggtgtagtctaaaattctagtgtttggtttcattttcggataactcctttcgcaatttttcgttttccctgcgtaattccttattttctttaactacagcctcatagtcgtctactaaaaagctatggctgtcttgtctcgtatttctcttatcacttagatatgaagtaaacaaccccaacaggaatggagctagtacactaagtacgtctttaagaccttgcaagtgtatcagctcctttctcagtcctgtgggtcatactcataagcaatctgcataaggttaatgattgcgtagatctcaaaaacaatagcagggtggaatctgaaatagccggctccaacgatgtgaaagctttccgcaaccagcagaactgtcaagaatgctactgacacgcctagaccaactttgatgattaactgtacccgaatatcaaaaacaccgcacaaaatcaaaattagtcctgccatcaagccgatactatcgacccagacgttattccacgcaggtgctagacttggtgggtaaaaaaagtaggttcgatctatcagaaagcagaccgccaatgccgagattaacagccctgttttgatgaaattccagcgactaagcttgtggtgcaggttgagcttgcggtgcaacatagtcttcacctgtgactttcttgtaacctgctgcgtccaataagccttgttgaactaagccttgaaagtaaggcttttggaaaagccccatttgatagtcaagtacccacatttgtaaaaataaagcgtttaaatcagtcataattagttacctccgttttcttgcttgttagtgttttctgctggcttagtgtcactggttggtgtagcagtcttagcttgatctgcttgcatgccaaccagaatttgttgcattgaagccataaccttgttggcttgttcttgcccttctgcgaccttttgcaagccttgggtcaatgctaaggattgttgtgtttggacttgttggctttgttgcatggccttcattgcttggtcaaacttatcgttggcttggtcaagtgcggcgttcttcttatcaagttctgcgctcttcttatccaattcttcaatcttttgtgtagcttcttgcaagattgcggcttgaccgtccttggagttttctacccagccattaaccttcaagtcccagacaggatcttttaagctgtcgtctggcttttcaatgtgccagtgccatggaagttctggcaactcataaggcaacgtaattactacgtgatgcatttctgcgttgacagagtcaggatcactaaagtaataggtaaaccccttgttttcttgtgtagcgttttcttctgcgcccgctactggtgcaacttgtgtgttttcatcagccattttattggctcctttctattaaaaaagcccacgggaactccccgtgagcaaggctaattttttgcataaaaaaagcactcaatgagtactaatactataactgttcccttgataaatacttagtcatgatatccgatgctttgataagcggtgtgtatatcccatcaccagtattaggattatttatccaatgatcaacgtcaacaatataatatggaatattatgttgatctaccacaacgcctgtgatttcacccgtagaagctaagccgcctatttcatccggtttattccattgaatcgaattactattgatagaatagctataataagcattaatgactccctctctagaccatcctattttatatttactgcaagttatcgctctgccaattaattctgtatttacataaccgacaataatttttgttgtagggtagtagtcttctttattaaacttcatgtgatctagcatacagccaccgcctttctggtggcggctctaagtacttggtataggtggattaacgggctaattaccccccctaagatttccgtacagtccgattttcgaacccatacaggaccatagacggtgctactatctcctttacagataattggcaaatctatacttctcccgactaaataagcggtatttgaagaggcacatacatccagctccaaatctgcgttcagtaaagagtaagtagtatttggaaaatccgtaaaaacggtgcttgttgaagttcctttgggaattttgacctttttagggaacataagataatcatttttattgaagatcatcttttcgatcatagaaccaccacctttctagtgatagctctaaatgcctgacataagcggattaggggggtttaccccaccatttcaagttgcgagcttgtgataccagcactctgtaataaaaaccataagtctcatttcccgcgcctaagctataagtgtcttgcgtttcaaatttgtttgtgataaatgcatttattcttctgtcatacccaacgatttgaaaattaatgctttgaacagatttgccagggttaacagctccgttatcatcaattaaaactgacccagatggcaaatatccagatgtaggtagaaaactagcattaaagttgccgttttcgtccgtcaggcttcgccattttttacgatcaaatagcatatgatctagcatgtttccgctcctttcttaaatagagtgaaagcatactcaaccattgacgcaatagtatgtagaaggcttttacccccccatattacatttctaacatttgttttttcaactacgcccgtgtaatagtaatgcgaataaactgcattattaggatgcttgttttcatcactatcagcgtaaatttcaagttgtccatcaaagaaataaacgtcttgacctgccccaacacaggtaacctcagcatcatttaatactcgccagccattacccgtattcgggtttttgatcggtgtttctgccatgacagtaaatcttgatggacaagcataatagtttttattattagctgtaatagcggacatatcgtttgaaatttcaaaccacttttttacattaaaaattagatgatctaacatgctttcacctctttctatctatctatttttcaatcatcgcaatatcgtttggattgttgttttcccattgctgggcttgtgcctcttggttggctgggaaccgcttgccttgcaggtagttttgtttgatgtagttgatttgattaatcaagtcgttaacttggttttgtaatgtggtaatcgtattaagtaagctattaatatccgacttccaagcgatgtcttcactccaaactggtccgttgccattaccgccagtgattcgagcttgattattatgataaccaacgcttagaacgcctttcgtatctgcgccaccaaagccaacaccagcagcaaaatcattcaataatggacctgatccacctgcgtcaattctaatagacgttagtacgctattaggattaccaaccccaaaaatatcttgccaactatttgagttttgaatctctctaaacagtggtgtagctatgttgtgtttggtgttgatctgattttgtaaattagagatgtcgatcatttttgccatctgtcgccagggttgccagttattatcaaccttcattcgataaaatggagagtcatcattatcagggtagtaagtttgaacaattctatgatcagcgccattagaaattatcagcgtaccccagatgcccccacaaggggaatttttccctttttcagggtttgtcacatagtaaggacctgaatcggtcaaactatcaaagtctggcgaatttgcggttcttgcaccttttaagttgttaacttgactctgcaaattgtccgcccttgatgtagcggcattttttgcatcttgtacttgggcgtttacgtttgattgatctgccttggtgccaatctgactaagcaaaacgttcactttattagcagtccagtcatctttgtaaagatcaatagtgtaagtgccatcagtattcttggtggctttccaggtatgatcttgcgtttgtccttggccgtctaagtactgcttgcggaacctgatctttgaaaaatcaattcccgcaatttgggcgtctaccgtagccttgtcagccttggtatcaacggtttggctcaacttattaagactgtcttgacttgccttagtgttggctaaatcggtaacagtcttaatctttgcatcaacgtcagtcgtatcgtccttagcactaagcaacttatcgacatcagtcttgctataagtcgttgcttggtccgctttggttgctaaactgtcattgactgccttaaaggatttgtcaacgtctgccttgttagccttgtcggcaatcaacgctgtcacttggtcggcgctgactttgccattggtgtcggtcgatagggctaaaagcttttcgtccagttgtgccttgctgtaactgtaatccgtaccaaccttagtggctaccacatcactaacagccttgatcttggtatcaacatcagcgttcttagcgtacggggtaaagtcgatttttgcaatctcggcatctaccgtggctttgtctgccttggtattaattgcatcattcagggttttaacctgcttgtcgatatctgtcgtgttggctttggttgctaactgacttttaacggcttcactgtcggcttttttagccacttcagcgttagtttgatcaaggttagattgactagccttagtatcaattaaagccgttagaacctgcttagtttcgttgattgcaccgtttaaagttgccggtgtaaccgatgcccccgggtcaaccactgccgtgacattggttgcgtcgccaatcgcaattgctactttaagatcaagagcgtcagtcgctacgccatccggtcgggtagctgctaggtaagcccctgcattagcaaccgcaacaatgattagcttttcgtcctcgcctttcttagcaaaaaagccaactgccgtgtaaggcaagtcagctgttaagccgtcattctgaaaagtggcttcaagcactaccgttgtgtctttgccgttgctttgtttgtcgctaacaccaatcggtacctgttttaaggggctgccaattgaggtcagggcttgcacttggtcagcggttaagtgactgatatcttgaccatatagcaccgccttagtgtaagtaacgtcaccaccagcggtcatcattgttcgcccttgttctgtgatataggctggatccctgatttggctcattcagtcggcctcctttctacttttcaatcattgctagatagtttggatggtcattttcccattgttgggcttgtgcttcttgaccagctgggaatctcttgccgattacagcgttctggttcagccatgcttgtccttcttctagtttcttaactcggttcaccaagtcattgatttggttattggcaccggtcagctggttgttcaagctctcaatttgtgtgtccttagcaccatttttgcggttaaggtcgttaattgtattttgttgggcttgaaacttttgatcaacttcactctttaaataaaagaccgtacccaggttgacgttacccgtgttgtcgggtgccacgccttgaacagtattaatccctgcacctttaccagcaccagcgaccatttgatcaatttcttcttttgtgtaggtgtttaggttaaaggtatggttgccatccgccttgaccggttctttacctcgtaaggtgatagtcgtgttcttttcgttgtcttcgatcttgccgttaaaatcagccgttactttagtttgccatgcattaagctcggcacgagtaacgtatcccacttcattaacagtcatatcgatattagcggcttctgcgattgtcatagacaattgtgcagagataacatcagtagataaaccgtctgggctacctgccgctaaggtctcgtgatcgttagtagtaaaagtgatagcgattaaagcttcatcgccttgtaccttttgattctgttcattggttgagtcaactcttgcataccaaccaatacaactaaaattgatgtctgccggttgattcttgttgttaaagtcagcaattacatcaaagtgatcatctgtaactggcgttaaggttaattgcccttctttgagatcgtccggcaaactagtgatttgacgaattgcttcatcatctaaggcttgtccggaactattaacgggtttttgacttgataggatagcgcgtgtataaaccaatgtgcctacgccgttaccaaccgataagaagatatgtcgcccggcatcggtcaagatcgtttgcttcaatttctctttaaagcccgtattaggatcttctgccatttcttgctcctttctttgtattaaaaaactactcagtcgcaatcgattgagtagttgtagttaatgttttgttcccaatagttaagccagcgtgaatttctgctgtttgtggcttgctccacactgctgttgtcgcccataccgatgatttagccagttgaccaacaacaccaatgaattggcttctagtgctttcagctttccagccggtccaccatttggtatttgatgacaaagtattgtgatgcttgaactgtgtagctatcccaatatattgcttgtcgcttgtcctagccttccagccagtccaccacttaacgggcgatcgctcgattttgcgatgtttgatctgcgtacccatgccaacgtaaagcggcaactttgtggtagttacaaacacgatctcatcaatccagtagcccatcgcgagcaggttttgaatattctttatgatgaatttttgcatttgaagtgtttgcacattgtcccacggtatttcgataccaacatgtcgaagaccggttttatagaccttgaattgttcaggctttgcatttaaggcagtgcccagaattttaaccattgagggaattgttccctgtgccctagagattaaaatgtgtaaaaaaatgataaaacggaaagtttcatcatcatcactaattctataagctttgtaatcttgcccgattaaatcaagggttgtgccttttgctttgtcaatgctacgccactccgcaattttttcattttcatcactgattttttcaagcagtgaattgtaactgtctaacaattgataaaaaacggtatcttttttcttattccagtggtcggctacttccgcgatcagttggtctgttgtctcataagccaattaaatcaacctccacatctccagggtcacaatgagcaaattctgaacgaccaatagaaatattttggtccgctaacttatcttttgtgctaccgattgcaattgttgcatcatcaacgccgttgacatcataagtaacggaataaaggcgggtaaaattaactctttgacccatttcaagtgagttgatttcatcgcaaattgcttgcttaatgtcgtcaacccccgcatcactgttccagtcgtcattaattgatacatcgacctttacataaatgttatgttgttgagcgtggtcaaatttgacttcttttaattttcccgtagcgtccggagcttctttaacaattgaacccgctaaagtgataccagccgcgcatttatcaattaaggttttagcgatttcatcatcgttaccgcctaaaacataaatgtgaactgaacattcgggattaccgtattcatccgtcttatacttgtcgttgtcaacgaagccaacttgcttaacaccgtttaaattcattaacgccgatttaatacctggttctgtaggaccaggacgggcggcattttccataattaaacgttttctaaaggtttcatcgtcttcataatcttgcccaccgcctgcagatcgtggattggttacggaaataaagtcttcatctgggttggcaaacaaagtaattgtgttggctgatacattagtaaattcaccagtttcttcacattcaacatttccagttccttgaaaagccccgttgctttgttttgaagtgataacgtcttctgttaaatcaaataccaagccgtcttctgtttcgaacttttcgccagcttgaattaaatattcgccttcagtcgttattactacttccgcatgagatggagcgtcaactttacgggtcaaactgatattgcccgctaatcggtctaatgctgaatttacagcggttgaatagaatccagaatagtaaatttgttcctgttgctgaattaaatcataagacgcatcactcattaaacgggcaaaaattcctagataagcattacttgttagtgcaatatcatcccctaatctagttcggtaatcgtcttcaacaccgtctaagatttccgcaaaacttggggcaatataaccggtttcttttaaaccaaaatcagttgtcaacttgtaacccccccttctacttcaccaatatttgcggtggctctaaaattaatctgcatttttctttcaggtttcttgataaattcgatattatcaacggtttcaacttccggtacgtttgcttcaatagccgctcgcatatcattctccgccgcttgcttattgaagtttttacctaaaaagctgctataatccgcgcccatttcagggtctagccgttgcatttcgccatatcgaatttctagcgttgccttaattctttgcgctatttcgtcaagaccgctagtcatttctaaatcgtgagtaatcggatcaataactaggtcatgattatcactcataaataggtccctagccatcgtcgtcacccttataaacagaaacgataattgagtcgtttgcatcatgcatcctgccggtatttggcgtaaaggtgttcccagtgccgtcccagttatcaatgtcacggtccatagtaacggctatcactacagcgccaactctcatagacttctttttcggataatgttctaaaaaatgtgagttaacttctgggctactatcaacggcttttaaatccgacttaaacttatctaacaattcatcaagcctatagcaagattcggcaaccggaacatctaagtactgagccgatttagtgccatcgatccaattcgccagcggttgaatatctgcaatgtgttttttcttgtcgtaagttaaaactttagctaaaaaagcagattcaagacttctgctgaatcggtttttcaccttactaatgttttcataccatcgaattggaaccctatttttttgtttcatactgtcatctccttattttttagatttactttttttcttgcctttacttttagattttgttttatgaccagccttagcttttgtaaccgccgcaatagtgcattgagtttgtggactttcgccatcaaaactatgctgtccatttttaacgacaaattttccttttaagaacttagaattcatgataatgccggtattaacggtaacttctgggactaagggcgtaacaatttgccaagttgtcccgtttttatcatcatcgttttgcgatggaacttgaattaagtctttatcatcaatcacaaaccaagtatttttcttgctattaggattgacaattacgagcttgccacgttcataaaacatttccgattttgctaacttaacaaagtttttaattaaagttagcggcttgcctttagcggtaaaggattttttaattccttcatttttagctaaatcgattttagctattttgataccggcttgttccgctattccttcaattacttgcttataagtcgttccttttcggtaaactcggttagcaaaataagtcttattatcacggcttttaacccttttatttgtagtttttggtttaacccatacttttcgataagcccaatggtggactatatgtttctgcccttttttaggacctctcttgtaagtttcaacgaccgaggtactataacgctgattcttgtaatgacctttttcagtgattttaacggttttgtagtgattaacctttttattcttttttagctttagctttcgagcagctacattgctgtagtttgtgccttcagtaaaagttaaaactttactatcagttgtcccatcattgcttaatttacccgtattagagataaatccttcagctatttttttagggtctttaccccagttaaaatttatccagcagtgcatcccttttttataaaagtctttatgttgcttggttaaattgaaaatagttgttgtaaaagtagacgggacaggatcattagtaaacgggacttcaaacgtaaaaggataattatgttcgtaagtttcatcgttatatacgatttgcttgtgtcctttactatcaaccgccacaaattccatatgtggatctttagtaacgatcattagtaagacacttcctcatccgttaggtcgtcatcattttcgttagggtcataacctagcggtttaattgatgggtcttctgtttctgatccattcgggtcaacaacgtcaagatacaagcggacctcatatccaaatgttcccttgccttggtctgttgccttacccgtttcgtccatcgtgcgaatgtcaattcttggcaattcgggatcagggatatcaataccaactaattgaccaagcaaaagaggctcctgcgttagaagcctcttattgttatgccaaattgtaattgtgtagtaatccgcaacttcgttgtaatctactctcatatcataggtatcgcccacaagggttatttgaaagatataaggaatatttttaacatcaacatcaagataatttctcatctaaatcaccgcctacgcaacccgtattttattgccagggtagattaagttaggattcttaatgtggttgactcgtgccatccattgaacagaactgccgtatttcttagacaaagcccacaaggtatcgccagatttaatagtgatagcagtgtactttttatttcgattacctgcgacagatttagaagccttagacgactttctgtggtgcttactatcatttgaagtggtgatttttgcttgatagacaaattgaaaagtaagtgaaacttcaatgttatctcgaagattcttatagtcgttgttcatatttgcgattaagtaatgcttatagcagaagtcccctcgataggttaaccgaacatgcgaactattccattgactaagcatgtgccatttacggtatgaatcggctttatctttgccaacaatgatgcctgcaactgttgcgcctttactatttacacgagcatatgagctatatggtgcgccctcatcaaccggataagaagtaatgtttgaagaaacattttcactttcaccgtctgccggcgaaatataaataatttcacctttgccatccgaacggtaaatagcacatttaccttcattcttccagccggtgttgtgttccgcaatttccgccaatttgttacttaaatcgattctttgcgtaacaatacggtcgtacttgtctttcgcttttttataattgttttccgcttgctttttccttttgtttgcagcatcaacaagcttcaaacaattatcacgttttcggataagctttttctttttaatttgattcttttcaaaatgtgaatcgaagtcatagccctgcgcctttgaaaacatttttcggtaaacggcgctttcatgtttttgccgcttgtcccagtatttcatagagtcatgggctttttgttcagctgttctcttttttggcttagttgcttgaaccactaacatcaccttcatttctataagaaatcatcatcgtcacccgtatcatcgccaatatgatcaagaatgatatttaatttttgacgtacttgttgatctacctcagcgccaatcatttttgctaatttttgcaatttagcattgtcaccatcaacgtcaccgttaatattcacggttacttgaatgtcacctaaagccccgccagttcctcttactgggcgtactttcggcttagatgaagttagtggctttaatctttgccgcgtcttttcatttgagtagatgtgaaccggatctttgaattcagctaattctggcccatgttcgccaactagaaccttattgccaacgacaggatcgccgcctttagcatatccaagaactttgcggatctccatggcacctttgacgtgctgagcattgtagccgccacgttcccattcagacgaaaacttgtttgctaggctggcaacgctaccagttccttccaaaacggagcgaagaatagcactgtctgagccttcgcctttaacggcaaagcttaattgtgtgccggcgtttttccagcttgtaccgtgacgtctagcataagcgattaagttagacttacgaccgccaagccattgacctaaaccggaagcaccaccgctgctgttaactgcaccagggtttaaaccacctgactcaaaattccaattacccagaacagccgcaataccgttcttggttgctttaggatcaagcttctttaatccgccagctagggctttagccctttcggctaagtcgccgccgatactaaatgaaccaagtgagccaagatcatcgctaagattctttttaatccaactcaaggcggtactgcctagctctttctttgcaagagccattaagttcttatcagccgctgctgtcttcttagattgagcggcattatgcaagccacgaacacggtaatatccgtatcccatgcctttgtcatcagcaattgaggtaacgcgtgcatggggtggcgtttcgttgaacattgttccggtgtgtgggttcttaataattcccacgtgaccagcggcacctgttccatggccaaagataaccaagtcgcctggaattgttttagataatgacttacccaagtactcaacacctgaactgtgttgcattgccacggtggtacgtccaatatctacgccaaagtgacgtaaagcttgcattaccatacccgaacagtcagatagtgtcttgcttgccgcacccatttggtacttaacgccactgaatgttgattcagcatattttaaaaactgctcacgagtaccacccttgccagtggagtcaccaatcgcattgttgatgacaatccacatagcagtactccaaggattaccaaagtgagttgacgcattcttgccaagatcgaccgttcctttttgcagaactggtccgctttccttgatgttcttggtgaacatatctgcaaagctcttagcaggatcagcaagcgcatgtgatgcaatctttcttaattggctatgacttacgccactacctttggcaaagtgctgaatgccacgttttctagcgacttcttgcgtctgagtgccgttcaagacaccccagccacgaggaatcatcaaatgaacgttgtcaccatgagggaagtacaattcgttgcttggtgagacaagagcctcttgacgtggaccgctagtcgcatcattgacaactgaaagagtattttgcgtcaagcgaccgttagcgtcagacccttgtgcaaagtgaaccgtcttgatgacgctaccgttaccgccaaattgactcaataccttgtcgatgcctttaataccacggttaagttgatcaatggtgtcacccattgcgtccttagcgtatgagcgcatcttgcccatagccttgccaaaacctttgctagttgagttagcagtagaaataacaccatcgtgcatgttattcatctgcttatccacagatttacgcatgcctgtgtattccttagtagcattagctctgtttttgctgttgtacttagcagtttgactgttaatctttgaccagcttgaagcattgttcttgcttaaactcttcaaagacttagtagcgtcatcagtgatcttcttgtaatccttggatactgtcttggtggtttgaccaagcttagtgttaccagtggcataacctttgagagttaagccacgacctaaaccaccagccatgactttgcgagtgtctcttgcattaagaatgtgttcacctggacgcaccttagtgatggcaggaccattagcacctaaaagacgtgcgtttgatccggctctgtaggctaattcaggaccggcttcaccaactaaggctctatgagctgatccgattaagccaccagttgcatgagatttgatcttctcatacttgaaggctttaccagaaccaccagccgcacggtttaagtcattaccaaaacctttcaggttattagtgatacctttacggatatcgccagctttaccccagaaattgttccaagcatcttttattgtattgccgactttgccagcccaatctttgactgctttataggctttacctaattgacctggaattgaagaaacaaaagaaccaactgcctttttgcctttattccaaccgctttggatactgttgccaaccttgccagaccagttgcttacactcttgtgtgctctgtttaactgaccaggaatgccaccgacaaacttctttacgccagtgacacctttgttccaagtcttttgaatattgcgaccggtacgactatcccaatttgctacactcttggcacctttagctaagttacctggaatgcctttgacaaagttaacagtagctttcttgccacgttgccatgcccttgagatattcttgcctgtttgactagcccatttgccaacactcttcttggttttatctaagtttttaggtaaatctttgaagaacttgtggctagcctcgacagcacgattccaacctttatggatgttgcctggtaggtcttttacccacttaacggctcctttgaagccattttggatagtcttgccaacgctattagcccattttctgaatttagggttgttcttgtataaaagtgcaggaataccagcccacggagcaatagcagttaaggctaattgcttgccattctttttgacgaatgaaccagccttgccaagtgctctgcccatagacttaccaacttgaccaccccatctaccaatcttactgaatgtgtctttagtagaccagccaaggttttcaagcgaccagaaattctttggtggctttttgcgttgccagccatgtacaaagctgttaacagcactaccaccaattcgaccaaagagtttaccagcttgtgcgccaagtgcagcaccaataggaccaccgaaaatgccaccaatgatggcaccagcacctgtaccgacagcgccaccaatgtctactgatctcttagctgcattgtgtcgatctttgtaagcttggaagccttgatagccaacatctaatgcagttccgacaccaacagcaccgccaagcaatcgtctgccaactagtgctttacctgttagctcaccaggctggactctgccgagcttgaacatgccaccgaatgaattacctttcagtgcattgattaagccaccctggcgagatgatcctttgatgtattgacctgtaaccgggtctcgtggacgtacaccggtctctttgccaaacagtagtctacctataccagcgccaattcctttaccgttaccgataccgaaattagcttttaagaaaccactggctaacttggacgcacccaatgtgccaagaatacctgttatataagcagcagcagtcttaactggctttggcatacctcgcatagcttcaagtagcttgttagcatagccaagagccttgctgataccaggtgcgacttcctttgcaaagctcatacccatatcagtagcaagttgcttagttctagctaactggttctgcaatgaggacatgttctttcttgacagccttgaaatatagccagtacgtgcagcattttgagattctcggacattgtgttgcatgtcaccgtagtgattcatcaaaatctgagcatcattgaaacctgtttgaccaaataaagtttgcaggtcggatgatactcgattagatttcttaccacgagacgcacgattcagcatctcaaagatggttcctaactgtttcaagtgaccatttctggtgtacaagctattaggattaatacccaaatcatgcaaggcacctagcatcgcagtactatgtggcgctttgatcaatctagtgatgatctgacgcataccagtaccagcactcgaaccttcttcgccgtagttagataacgtacccaatgcacccagcatagtatcgatagtttgaccatttgaatgagcggcactacccatcatcttgaaggactcgccaaaaccactttcaccaccaacgtcaccggaagttaagtcagcaacgtaagcggctttgttcaaaacatctcttgtgtacttagacatacgtcttacactattaccagctctggacttatagccaaactgttccagcataggtgcagctgagttaacgattgagttgtaatcttcgttagtagcacgagcggcttgcaaaaagtacttgtgagcagctaagtcttgttgaccggaataaccacgtctgagcagttgctcagagcctctagccaattcgttttgatcaacaccataacgaagagacaaacgccggttttcagcctgaatttcacgagtatttcttctagctgctctcggagaatcaccaccggtttcctgcaagttcttgataacgttgtattcatcagccaacttggttgcttcgccattggccttcatgaatgcagcggcaactggaaccatcgcagtagcaatagatgaaccgacttgaaccaatgctgatccagcacctttcaagcggtcccagccactctttaacttatttgatgaaccggtagtcttatcaaagctttctctagctctgtcagatgatcctctagcacgatcaaaaccgctacccatatcaccaagtgcttttgatgattcatgagcacggttcattgactgctttaattggtcagttgattcagtagctttcttagccttatcagcaataccagacagatcactttgcgcacgattgagattgttattagtgccaacttgcttataactattagctaacctgtcaatctgtgttttagtttcacctgatgcacgattaagcttgtctaagccattagcggcagaatctggcatcttggtacgtgacaacacccgattaagttgttctgcattagctttaactttatcaatacgtctatcaactgaatcgaatactgaattatcaactctaacgccgatatcaataccaacatgtcgtcctgccatctatctcatcctttcttgtgcaaaataagaaagccttattaggctttaactgtcctcaccgccaaatgccaacgcaatgccttttgccataattcgtgcttgatctttagcggttaaatatgtctgatatttcaagtcttttttgactacttcccacatcactcttaattggtcgagcgttgcatgattgatccatgattcgggaacaccgtgcattaccaaacactgtggtaaccacgttgcaggatcagaagccaaatcactaatcttcttcggtgtagccttccccattaatgcttgattgaaaccaatctaaaatcttgttgtaagcatcgtcatagcctccacgcttgtcaaaccaatcgagagagtaaatctttggacgtacaatcaattccttaatagcaacgttcttcatgaagtaggtttgatcaatggcaccaagagcagttcttgcgtcatcacgtaagcttgaagcttttgctacacctggaaaaattacttcgatagtgtattcattcttcttgcccttattgatagttaagaaagtaggcttaccagtaagtgaagcaatttcactagacttttcttgcttatcaatcaaagccatcatgtcttgcaagttcttactttcagtagccatttggctagccttatcttcgtttgattggttgttatttacgttttggttttgaatttcttcgctcatagtttttctcctttaatttttaatttctgttttgtaagcgtgaaagccattctcgatactaacgaccgactaaggattcagtatcaaggttaagtgcgtgaatttgccatgcacgattaccggcgttttgtgctgcggtgttgtctggcatctttgagatgtagcagtgtgtggcggtttggtgaactgttgaagttctcaaatcgagtggaaattctgcacgtgtgttagccaattcagtcaacttggcgttgcttggtgaagtttcgttcaagttgacagtcaatgtggcaccggttttgttgttgattgaggcaacagcggtgccttgtgggtcttgtgcgacagtaacattgtcgttgtcgtaggcaacggaaatcatggtatctgtcgcaaaaccatacatcaattcaccgtcaaccattaaagtggtgtcattggcgttgtattttgccatcaagccggtttcggctgagttaaaacttgccatgtgttactcctcctttaagcttttgaattagtgaaagtatcagattgaacagtgccgtgtacgagaacggtgtggatagcacctgaacggtggtatctgaaactcaaaccaccgtagtgacgagctgataagtctttttgactttgagctgaacgtggagtggcggttactgagtaatcccccttgccagttgattgagtttcaccggtgtttgagtcgtatacttcttgttccaaaacaattccttgttcgtaggcttgttggaggacttggctacaaatggcggcgagtgcattaatgcctcgttggtcatatggaaccttgtcggtgttttgcaagtacttttggatcttgtcgcccatattggtttttacccaaagatcgccgtggagtgagtcgatgtaatcaccagacaatacccagccttctgatgtttcgccttgtccgcttacttcgatgtaagcaatagcgtgaacacggtcgatagctgacttttcttgaacagtgatttggtcagcagtaatgcccttaagctttctgaacttccaggtaactaagccaactgtcaaggtggcggttgcaccgatgagagctgcatccattggttctgataagtcgtgaatcaagccgatggtgtagttttgtgcatagaaggttacgtatgcggctggttgagtagcttgcaatactaagaagtgatccttgttagcttcgcagatgttagatgcaataattgcgtcatcacttggggtggtgtctgtgaattgtgacttatcaaagatcatgaaggcccagttgtaataccagaatgccttcaaagcgtcagcaagcttgccctttggataattcaatacggcaatacggtcagatgctgcttcttgcatgaagtagttgtctgacttgatgtaaattggatcagtcttgtcgtagtaagcgccaactgcgtctgctgttgcgtattcaacgtattgagcaccggtataaggatcagtcttgcggcttaatacgccgttcaatacgtcgttgggttccaatttgtcaggtacaccagttactggcgcaactggtgtgatctttggtacattgatggtcttgctgccatcatcagtagccttgccatcagttgtgccagtagtcttgcctgtatcgctcttagctggcgtatccttgccggtgccagtatcagcaagagcaggctttggtgctgtagaagatgagcctgcgtcaacttcatgcaaaataagaagattgccaagcccgataattgcaggtggcttgacaacagtcatttctacgtcaacgtccttaactctcgtaaaaggacgaacgtctgtaatggtttctgccatttgctattgctccttttcttttccattggcgctgataacttcactgtcaccagcgtcgctgagttgtactgtattgatttctgtttccggctgagcttggaagtggaggtcatccggtgagtaaacatgaccgccattggacactaaaaaagaacaatcaaagccgaacctatagtcgtaataggtaccaactctgactgttctgtcgcttgtgttcgtaaaattctgtgggtcaatatccgcttgctcaaagtagttacgataaacactgctttgaaatgcactgtaaaggtcgtttgccatattcatcgcttgaatggcgttgtcagcatggcaatcaatttgtaggtgtgagatgtactgtcgtcccatgcccaaccaatcgcctgttgtttcctgttccggcacaataaacgaataagtgacaaaaggatattgtggacggtcagaaactaaattctgatagagcagatcgcaatcaagacgctctttaaccagttgctgaatgatataagtcagcagaagattatctttgagttgaatttccatgttggtgtgcgtcatctcccttcaattcgtaaatgatcaggtttgaatagtcctgatagttagaagagttagtgacttcaaataaaccaccctgtgatgggacattgaccattgtgtgaacgtagtacttcccagatgacagccacattaggtctgcattggtttgagtaccgccggttaaatattgaatgagttgtgatgtcaactgattaaccggaataaccggctcatgtcgtttctctgctgttttttcatcgattaaggtagattgatcgtcagacattaaaaaaccacccacaagctcttttttgcctgtgtgtggtttgtctgatttccgaacttcgatatcaacgccgtaatcgtccaacatcgaagctacatccatgtaaaaactcatagtgtcctcctatttcgaaatgatcttataagtgattttgttaatgagtgccccaccttgaccgccagcatgtttaccgatcaatggattattgaaacctttgttatcgatagtcattggtgcgttgcctggcttatacagcctgcgcatctcatgctgaatgtcagcaacagcgacagcacctagcttgtcaagtaagccttttcctgtagcacgaccttcaaacactcgctggactccgacctgtgtcaatcgaatgtacttttgttcatattcaatcgaagtcttacgaagaaacggtcttgaaggaattttgacttctttcatcaaataaaagatgatcttgaagcctgtatcactgcttgcatctttgaccgctaggacatgagcacctttcttgccacctggtcggaacagttgctgatcaggatgtttttcgtcccattcactactgctcataggtaagccatcctcaccaagttcatcatttttacttggtatgattaaccagccatccggcttgtgtggcttgatatcagcgccatattccaatgcagatacaatttcgatcaatcgatcgttaccccaaaaaccaattacgaccatgtagcgatttaatatgtcgatttcgtgcttgattgcgtcccaatcgcttttatcatcagtgattttgatactcaatgttgcactactccatatcgattactgccaccgcagaataacttccataagcggtagtagtaaaggccccaaacgcttgaatggagccaatctttgccaattttggactcgtatttacgttccaagacggcaactttttcatccaaaataccctgaccagcagaagtatccatgctagccaagtgcagagccagatatttgatcgctgtaagcgtaatgtcattccatttaccgtcaactggctgagggaaaccatccgccaatgtgttaacggtcgcatcgtgaattagctctttgagagtgtcgtctgacatgctccgagttaatttaggtgctgcgttcttcaatgcagtgatcggtaccactggatcatcagtgttcatagttcccctcctttagctaattagcagttggtgtattgataccagtaatttgaacgaatgccgatgggtagcgaactgccaaaccaccatgacgttcaacataaggaatcttagtaacaccgtcgtggtattcctgttgtaattgagtcatttccattgcaactggaatttgtgcaatgtcctcgtcagttaagcagacaatagccatatctttttgcttgtcagcctttgaagcgttctttgcatgccagtattgaccttcaagttcaggaacagcttgaattgaactaaagtattgagaaaccatgtctctaacagtgatgtcaggacgaagctttgatactgggttatcaagcaagtcaatttcggcttgtggcatcaataaagttggctttgcgtttgcgtaaccaatcaagtgagtaatcttttggactgcttcacgtaagacattacgcatcttcaaggcaccgtcttctgtgtcttgtgccaacttatcaagtgcgtggtcaccatcaagagctaattgttggaagccggtcacatctgtattagtgtcagtcaagccaataattttagtgttaggaccaatatccataccgttgaaaatgatacggtcacgacgttcagcaagaccacgagcaacaagagcagcttgatcagcaagcaagttgacgttagctgcttgtgcttcttgaagttccatccatgagtactcacaagctaatgctgattgagtaattggaacttcatattccttgaaaccttcgtcaactactggaatgtcagtgccacggtttgcgtaggcttgtgccattgccttagttgaacgaaccttgtatctgtaagacatttggattgggtatactttgatagtgctaaataattgcaaagcaactagtggagcagtctttggatcgtaaatagtttgatcgatataggttaattgttccttagttgcaactcccatttgagccattaactcattacctcctaatttttcttggtttcagatgctggggttggcgtttcaggtggttgaattgcgtgtgcatcgtccttggttgggtcagcgccaccggtagtgccaccaaaacgagtgcggactaaaagacgtgcagttgagcctttatcagccgaacttaaaaaccgaccaactgcatcgtccgcagtggtcggtttaaatgaaccgtcagcatcaacagtggcaagttctccacggtcgacatcttcattaaccggaacattgatagttccatcagtaagaacaccgagaacttctcctggatgccatttatctttttcaatgtcgtcttcatagaagtggtcaacgtctaagtagccacgctttactgcaacgccgtagataggtgccttagtagctgtaactgcttgaccgttaactaaagaaacgccagcgccgaatggaatatcggcactagcgacttctgttaagacttcgtattgtctttcaactgtaccggcggatagatgaccgtcgtggtacatggttccatcaggaattgccattacttgttacctcccttattcttgtttgcaaggttgtagaagttttcatgcatttggttaactgaaacattactctcagcactgtcacccttgaagtcgtgaacagtagcaccaacgaagtgtgattgtttgcggttctttactgcattgaagtaagcattaacgtaaacgtcatccttgccatcaatttcagcggaatcaccatcaacgctcttgatagcttcaatcttcatttccttttctgacttgccgtgaggatcaaagctgtcgccaacgatagacttcacatcatcgatcaagcccatacgttgatcaaccaacttgtctaaaccgtcgccttcaaccttgtcacgataaccttgcaattctttttcaagactatcggctttggcttgtgcttctgacctgtcgttttcagcttgcttattgccgcttttcaaagaatcacgttcatcagttaatttcttgatttgtgcgttaagttcatcaattctcttttgatttgctgaattgtcagagtcaaacttgatcaacttatcagcatcatcggtagcgaccttgattgtttgatcgccaatgcgtaccttttcaaaatccatttgtggtttttgccctttctctttactaaaatcgtccagctcaccgatcatttcggcactatcgccgacaactgatctatcaagtgaaatgtctggaccttcccttgccacatcaacaacagcaacgtggttgatagtgatgtctttttgtactgagtcatattcagtattcttgtagacaccgctttgaggcacgacctgcgtttgaaagccaatactgagttgacgcttgccgttatcgaccttgttaatcaaatcagggttggtaatcgtcaaatcaactcgaactgtgccgtctgcctcatctacatgggcattcgacgcagtaagacctttcatcaaagtattcgtgttgctcttatcaactaggattcgctgaccagcttcattttctggatgattgtcagtgattggcttgttgtttgcactcgccaccgtgctgtcagacaagatatcctctggcagtttggcttcatgacgaacagtgccatccggtttcaggtatttaaaaacgccagctcgtgcgataggcacgtttctggcgtgaatgtaacctgtaattggatcctttgttatagcgctgactgttgatgagtcgtacctcgtaatcattacttaccaagtggtacgttgatagcttgatcaggaatgtagatcacttgaccagccttaacaactgggttggtcttggataagccgttgaagtaacgtagttgttggtaggcaactaagacttcatttgcaacatcaagtaaggtttgaccttccttaactgtgtagtttttgcaatttgtgtaatcaaatccattctttgccactcgtttcacctccttttttggagttgattgagcgtttaacgcagttttttcgtgattaactgctacttctggcgcatcttttgtggtttttggtgcgtcaactgttactttctctgagttaataccgaaaagtggtttgttatctgtcatgtcttacctcctaataaaagctaaatatcggatcagccacacagcggcagttgattggttcgccaggcatctgtccatcatcaccgccagttggatcgtcgtaggtttgacgagtgccatctagttcttgatgtttgggccgtactcggttatcttccattgattgccagacgtaatcttttgcgcccgccgctttgtgtcgactctcattgaacttagcaagcgctgatccggtttgatcattagcaacaagtgcagcatgtctgactgacataccagtttgtttaacgatttcttttgtaattacaccggtgccgtcaccatttgagatagctcgtgagatgacaccagtgatgctgtctgcatatcgatccttcatgtacttgatcagttggacgttctcagcaactcgtgcgttaaatatcttggtcaattcagggctatcacgtattgggttgataccagctatccgaatctgcattgcaacgttgttgtagctaaacatatcaatcgttctaacaaactgttcagcaattttgcgaatagttgcatcactagtggcttgtttgatcgtgtagcccatagcatcgaggttatgtagtacattctgttgttctgtttcagtcggattgttctttttaggtgcatcaccaacaatttgagtaccgcctttgaagtagtcccccatatagacgttgaaatactccatagcgactttgcgccactgataaaccaatctaacgatgcgtcttcgataagcatcttcaagattgcgaggatagcgagtgtgaggcattcttctatgagtcgtcatgtttctcagctcgtttcttgtctttttgatagttatccacaatgttctttacagtttcagcatcaacactgtcacctgctgtctgcattgctgggttagggttggtgtcttgacctgctagcatgtcgtggacttcgtccggtgcaagaacgccgttagaaatcaaactactgtaagcattagcttggttcatgaagatttctgagtttgtcttatcgtccatggtttgtaagtcattgaatacgatcttccaatcaagttgatcagggtcatcaccgtttgcgtacatcaaaatacgagtgatctgttcaatttcaggctttaacaagttggtctgaattgccttgatgctgtcgtagtagttgatgacatcttgtgatgcaccagctaatgtcccagcttgttcaccagttagaacagattttggaataccacatgcagcactaagctgttgccatacgaagttgtaaagcaaatcaataccgccggttggtgttgctaccttttcaatactgtcttgactatgaccaaacgccattgcttctgtattaagtacttggctaatctcacgcttatcacgtttaaagtcagcgtctccttcttccatcaactgatcagacttgtaaaacttgaaagtaaattcacgtaacatcttcccagtcgattcaagtgcgatatccattgctttgagttgatcctgacatctggtcagaattgacgtacctgtttcatcatcaatcgacttatcaagtgcaatgtgccaataccggctttgatcaataactcttggagtgtttctcggagtatttggcgtttgagtaccgttaggatcgaccttgtaaccggcgttttgtgttctgagtacgattgcctgctccttaccatagttaagactgagtggatcatcgttagacaaaaccttgtcaacgtggttttgaccaaatgcatgaatgaagtgaactttttcaactgtggttggatcaagtggcttacttgaatcggcatcgtcattttcattaacaccaatagtgatataaccatcaccgccttcacgttgataaacgagttgctgagataaggcttgtgtagtcttcaaatcataatgaagccgttgatacatcttctgacgttctggatcgtcttctacaatcacccgaaaaccatttcgggtagcatcttcggctggtttatgaacgatacgtcttgcaatagcattgtgttttgtctcattgtgcagtgcatcgtagtcttgttcatcattaaccactcgccagcctagattgtcataactggtaaacggatcaaggtcgatgccgtcaccaacaatggttctctttttcggttctgattttcttctgctaaatagtcccatgtttcctcctttctaatatctgataactggtccacgactatggttgtcgtgaagtctcttaactgcgtaaaccatcgagtcaacgttgtcgtcgtgcattgcgttaggaaatgcaaagatttcttcaagccagtcctcgatttcaggtcgccactttggatgtggcacatagatgtttcctgattcccatactggactaactgatgctgctcttgcttccttgctatctgcaccaggtgaaacagcaacgattcctggtatctcgtgttgcaaggcatcaatgatagctggaccattggctcgatcttcgaccaactttgttgttgcgtctgggtaaaaccttgtcatagctctaatagcatctagcgtctcagtgaatgacaaacgcttgtgacaccagccaggtcgtagatataagtcagcgtcacttttgctccacacttgaccagcgacaaagtcatcgttggctttgctcttgaaagttgcgtcccatgcctgtactgatgtatccaagtgtttaggcaatatctttgcgtctttatcagttaagtgaagtcttacttgtgtttctttatcaggaacataaaacttcacccattcacgtttgaagatattaccgccttcaactgttggactttgttggtacaaagcagtgaacttttgagtccccatgtcgtgcttgttgccaagtagttcatcaaggctatgcaagtcaggacatagtgcctcgccattgtgtctgcctaatacgtctgtttcatcaggtccaagaccggtagcaatagcaggaagtttgatttcttcccatgggaagcttgaattatcaagtaagcgtcctgccaagtcgtcctgttgccatctggtcataattacgatgactgagccacctttttgaagtcttggcttgaatgttaataaccattcattccaaatcttgtctttaatcgtaggtgatccggcttcttctgcgttcttgattgggtcatcaataatcaacaagtcagcactcataccagtggcaccaccaaggattgaagttgcatagaaaccaccacgatgatcaacaatgttaaattgctgagccgtgttttttccaacttgcaaagcatgatcagcatctggtactctttgagaccataaagaaaaaagccgtctatttgattctgcaaactgactgtataagtcttgtgagtaagcagtaaccataacgtgcttttcgggatgcttcataaggtaatagcttggaaatgttttggtgatggtaagcgattttccgtgttgaggcggacatgaaattatataaaaatgttgctcaccatctgcgattttttgaagcagtgaacagatgtacttcgtatgtggatacattgtcatatctgggtaaacgagttcaaagtacttctgatatgaccgccaagccagttcatcttttagttcattgacagttagctttttaaactcatcgagtagtgctgtatctgtcacttgctatcaccgccttcaatagattgaatcatttcttcaagttgcttatcggacttcttggatattaacttacgcatacgaccggacttgtcttgtgattcattagtacgtgattcagccaaggtagcctctgcattgagtttacgaagttgagcctgtgtgattggatcatctgtaattggcattctctttagtaactcctttgcagcatcaatccgattcttccaatttggtggtatctcttcaacgccatcatcagtctctacagtgatttttaatgtcccacgcataactccacctaaaaactctaaaacctctttctgctttggaattttggcttcatcgatctgtttcatgcgcttgttgatataatcgttgacggggggtaatcggagggtacgttttgcctctgtattgatcgtttcaggtttcattcgatcagttacatacgctgatttataggcttctgtggcgttaccaatttcaatgaacttatcagcaaagtctttttgttttggtgtcaatcttggaatagtttttgacttctttttctttgcttttttcttcaaaactggtttcacctcctaaatcaggccaataaaaaagacactgaacttaatcagtgccgttgctgtctttcaagtcgtcaattctcatattaataatgaatgctaagccgtttagttgattagattgatcaatcaataattgcttttgagtgtgaccaatctttgcacattcagatgatcttagaaactcttgaatcttgattgatctttctgtatatccttcacgttctttgatcaacttgctaattaattctttgttttccatgatgttgtttccctctttttttatgtttgtgtttctttttgtgctcgacatctctttcaagttcagcaaggattttgttttcttccttacatgagacaagaccatattttttagtgcgatacattgctgattcctttcacacgaaaaaaagcactggggttaaccagcaccttaatacgtgatcctgaatgtgttcatacataatgtgttcttgattttaactaacagaaccacgaaatgagcagtaaaggaattgaacctaaactgtccgccattggtcaatttaattcgacagaggaaatctatattggaaaaactcgcaataatcgactcatcgacggacagacaacgagtctgcccagaatggtagcagtttgactactacctaatacaatttgagagattttttataatgatttattgattatcagttcaccaacatcactgctggctaagatctaatgaagtgccgaccttcagtgcatgcagagcaacatgatcaaggggagattttcacctccacaatttagaaaacatgtacgttgccgaacttagatcaaggggccgccttttcaggcggttaggttaggaaaaccttgttatcagaacacggactcaatagtccttttttatatcaatgctccgctcgcttgcggtcatcgcagagctaagacgtgaggcaggtattctactgcgacacgtcgggaaacatgatttatcttgtcttcaagcatttgttgaatcttcgggttcaaattcaataaaaaacaacaagattgattcagcctcagtatttctgaggctatgacagcatctggattcgaaccaggtaacttgcaagccacatagtatgcaatgctgtcactctaatttacaaggagaatagatctaattggtaaaaatgaatttccgtcgcatcggtcgaggtagatctcctatctactttctcgacaataacaattatctgcttttttcatcatcgggcgatcccaacttaatcccgattaaatcccaagcaaatccttttcaaatcccggtatgatcccactttcatcccggttacatcccattttttcgttttcgcgtagtttgatctgctctccaaccagcgtctgctagagtttcaccaggataaatctgcaaatcaaaacgatcagcttcatcaggaaaatacttgtcttgtgccgagatccaacactcagcaaattgattcaatgcaacattcttgaaatcaccgaactgattatgattcatattacagtcacgattgatttcccatactttcttatgtaagacgtaaaattcaaatagtatctgaggagatacacctgatgtatgatcaatggcatatttgattgctttcaaaacatcaaatgctgccagccttctttccatcatcttttcttggctattaacgccatttgagtgagcgggagcaagtgatagctggggactagataaactaaccccactgagccgttccattctgttaatctggctgctgagaaaatcatctacattttctgctgttaaaacttcgtctggtaaatcaaataaaaacactgtcccactcctgtatctcttcaaactttaaaatctacatcacatcattatttattttgcttattgagtatttctcctaatttcttcccatcttcaaacgcttgatcagtactacctttataataaccggcattgtaattggcttcggcaatgtccttaaccaattgtgcaatgaccttggcttgttcaacggtggtaataacttttgcattctctagcattttatagccgtcttcgttgatgacatcataaccactctcagctaagactgactttaattgatcaattggtttcatttttatcctcactatgaatctctaagcgcaatttcaagcctgctgtacttacgtaatgatcagctttattgcctaacttccagaaatgaaggttcaaatcgtcttctaaacgatagatgtgaacgccatccgtgattgtttctcctacaccaagtactaacaactgataatctccttaatctaaacttttatcttcaaattcattgacgttaccaattgacttgcccttaacaacatttgctgagaacttaaccttgtcaccaggtctaattaagttggcaaaatcataatcattagtattcacagtgaaaatgatatttttgcccttcagcatgaacattgccttgttcttgttggaaacaactgcagctcgattaatcacgccagagaagtttttcttcttttcacctggtgtgttacctgccgaagagccagaatcaacaagagcctgtctaaatgaatccagagcacttgttggattgctaccagttccataaatgctttgatcgcttgcatctaagtagtaatagccacgaatagcatgagttgaatctaggatagtcattacccaagttggacgattatttacgttatagagaattggcatattagcacgccatttttgagctttgtagtcttgatcagcattatttttagcgccatcgctgtccataatgttgttagttctgtagaaagtgagcttgccagttcttgcattgatcatgctgtaacctaatgctgaatcagcaccggttctatcagtagtaaagtcagtgaagtaactaatcgaaccatctttgttgaagactgaagttacaccattttcaacgccatttccggtcggcttcatgatgccggtcttgctccagttccagaaaccatacttatatttaccaaaatcgttgttgatcttatcagcaatgccagtcgtgatgccttcgtcaatgaacttaggcatgttgtgcactgaataagtcttagttacaccggttcttgcatttaggacagccacatgtaatctgccgaagttaaccctatggctcattggttctgacttgtaaactgtttgaacccaataaggatcaccattgtcatcaatttcaagttgtggcgtatctaaactaagccaactaggattgtggcggtagatttgacgtgacgcatctttgttgaagtagccacttactgcgtagtaataaggtttcttaacaaatcttggtgttgcattttgtctagtagcatcaatgatgaaatagccaggaatctcaccagctctattgctttgaaaaaatccgttatattcaattggaatcacataaactggcttgcctttgtagtactgtgattgaatttcatcagaaatcgaataatattgcgtgtttggaatatcagacgatgcttttctaacacggttaataactgttttaggtgctaatgcaattggagtttcattgcgcttgaatgttggcgcttctgtgctttttgaatattctttagatatagaatcccatgttggcttaacagacatgtgtgagtgcaatgatccgcctatacaaactaagaacaaaatcactaagacggggatgcccaccattaaaaactttgaactagcatcgtcatcatcgtcataagcctgagaagctaacgttaaataaaatatcccataaaacgtattaccccagagaatactcagcagatttctcgacggtagcaagaagtaagtaataaccgctgctataatccagatcggcaaaattgaaataaatgcccaaattttatttgatgctgtggctaaaacaataagcatcatcactaatggcaaaattgtgtaaaagaaccaaattgatatcatttttcttccttccgtttacgtccatattttcgatttctaataattttaaataagtcacaggcaactgcaccaaacataagaaaagtcatcaccagtaagcccataaataagatgatcaaaagaattttaagtataattgcagccatctccattaataccactcctttttatcggtatctggatagccataaccgattaatccttcgtttacaatctttagcgcatcgtcaactgatctcgcaataccgtggattacttttctgtgcaccgacggtgagcagtgagttaatcactgctgtgtacttcataatgtcatttgatctcatttggatctgtcgttttcttttatctgcttgcattagtaatcctccatattttgcttcaagtaatcactcatgttcgaatacttgtgatcaaagtcgacaggcacaagagcatgatgtgctttcacatagtcaacaagtgcatccccgccagtcgccatcataaatcgtgactttcatgttcttcttcatcagggctaataaattcttcattattgttaacaaaattaaaagacctcatagcaagattcattaagaaatcagttctgtttttcttagcatcaatattttcaagaaaaggtatcaaaccattttcatctaaaagaactaaagctctattaatcaagtcaattgcaaccgcttattgatcttgtctagttagtttttgattatctatttctatttctttcatactagatacaagtgcagcagaagttaaatagtcaattaccatttgtctatcagttattttcatttttatgctcctcttgtaaagctcttcctgtaactgttcatatgctacttatcgcttttaatttccatcatgatcttcaaagttctagtaagatcatgatttctttctacaagccggtcatttgtctgctttatctgctattttcttcatcctcataaattactactgttactagctcgttattctcatctttaagggttactgcattaacaacatcatgaacttttatgaattcgttggggtcctcgccatcagaaatattaaattccttttgtttaaagtgtctgtttcttttttcttcatacatcactagtgcggaccaatcgcccttaccgtagtcgtccgaaaccacctccgtaaatttaatatcgatgatttttttaccttgaataaactcattaatctttttatccaaatcaggcaaaaaatgagaccagagtaatttaactttcataatcttcacccctcaatcattacttttttctttatctgtcatttctttaactccttttacttttaccagtcttctgttcccttttcttgcaaatggtggaaaaaccaaaacctattgcatgtgttacaaaggagcgtaatttcatcaattggctttaacttagcaccacaataagggcatttatagccatagaaatattctggtgtcctattttggaaaactggctcatcatgccaatactttgaatttttcatcttttagctcctaaaacggaatatctccgttgtttctaagcaactcggttaagccgataaacctagcatgcggcgcataggtagtgaaccatgctgtatgctcgtcaacttcccaaaatctgcattcgtacctcgtaagagaaaattcggattgcaaccagtacttttttccgtcaactagctggtcggctgacgtgattaattttctaagtctattcatttcttgtaatgcctctcaatcttgatttcatcattcagcattgttatcaagtagcctattgggttattcaccaagtatgctgaaacacgctgatcatatactttgctaagactttcaaagtcatcatcagataacatagaaacttttaatctgatttgtttaagttgtcttagtgtaggtctaagatgctgattgaatgtcttattgtaatttctgatagtgaaccataatttattcattcttgaatttatttttgtttcttcttcttctgatttgtctttagagttatccacagtttcattctgaggggagggtttcgatttattagaagaagaattaatattattacttgtagtattatctcttgtaatattctctttgacattttcgtcaatagggtcttgatctttttgacaataccctattgatctttttgtcaatacctccccttccacagaaacgtatatcctacgttgctggactgttttatctgcagctctaattatttctacttgaatatagcctttctttttaagatgacttatccaacgtgataccgtttctttactgacatcatagagtggagcaaagtaattgtttgaagccgtgcaataaccaaacttgttagataaggcagttatttcactataaagaagcttttcattaggtttaagatctttatcatatctaacatatgctggcattattgagtaataacttggttgattcattttactcacctagctttgcaaatggatctttcttcttagttgaatctttcttgccatcaacaatttctttgattttttgatcttcggcatcttgttttgacttttctttatcacgatccttaagtaagcccttagagaactcataaatagcgctgatactcttaatagcaatcttcgcattaactgaattgcctttgtctttgattacttgctttgctaactcatcaccagccatagccattgcaaacacttcagttaagtctttacgcttgccatcataattaattgtcatgcctttaagctccttaggagtcatgtagtcaggcttagagttaaactccttagcatcagtgtcgtcttcagaagcgatgccgtagatagcgctgattgaatatctacgagcgtaagtaagtgccttaccgtattcctgaggattaggactgccgatgtccaacatataagaaccgaagtcgaagatcgcacctttactattaagcaagtagttatgaataccggtcttgccaccatcggttactggttgctgaatataagcgatgtcctcatctgaacttgcttcttggatagctttgataactccgttcaagtcagcatatttatagccataaccttgtttatctttacttggctgttgcagctttctttgaacattaacaaatgcactcatcaaagccagttttgccttcaatgcatcttctggcttcaatcctgagatagctttgaagcaaatttgtccaatccagtcggctgggctttctaataattgcatgattagccctccaatccttgatattcaataccgttgtcctttaggaaactttgtagctgcttcatttgccatggagtacccttgacttccaacttaagtgagatcaccttttctttgatctcaccagtttcaggatcaacgtacttatctccttgctttttaaggttgttaagttcattcaacttggttttcttttgagcttcagagacggcatctaggtcttccttgtattcggacattgcattaagtacgaatgacaaaggattattatctagtgctttgatccagtgatcagcgggcaaacctaagctttcagctttttcactgatgatcttgatgttgtcagcaagttgagcttgttcttgctgaatcaaagcaatttgttgatcgacttcagtttcaaacttagttttgctgtaggatttgttgtcccagcttgattgatatttaatttttgtaggatcaatttcagcaaattcacacatcgtcttagtgtgctctaaattattttcgtgtctttcggcttttgccttatcttcatatactttgataccagcactaatttttgcgcttgaatcgtcaattttagccactaacgattccactttatcgttaaaatctttaactggcgcttcagctttctttttaatttcaactttgcgtgccttaattgcttttgtaagcttatttagctttgcgcgggtagacttagcgtcttttaggttgtcttgcgttacatcatagttttcaagactttcatgtaactgatcaatttgatctttcatttggttatatccactgaagtcaatttgtgcaggtgcaaagttgactgggaatgctacagccttttcatctaatttaattaattgattttcgttcatgattagtactcctccatacctaaataactggttaatttttggcaattataagaatcttcgataaacttcaaaagatcatcaccgtagttgctaagatctaaaataaaatcaaaatggttaggtgaaacatcgttgtagtccatttcatctgctaacttgtttaaatctccgttgtaatgatttaaacgtcctttaagaaattgagctgcagatttatagccgtttacgaagtcgtcagcagatttgccaattaaagcctcacggccttcaggcaactgaacaactaatgtgtcagggtcattttctgcttgtatttcaagctcttctaattccttcttgcgattaatttgttcttgtgagtaaagcattgtggtataatctccttagttactttttggtttaaagatatttttctttgtccctttagctctgcaaagctaaagggctttttttatgcctaaaaaactcttgatgtaggctggaagttcagaaaagctcccgctagcaacatgcaaacaattgctattagcaaggcaattttgttggacagcgctaaggaaatgggcttgtctacgagatacaaagtatttaaaaatctgttccataatttcatgtttcctcctatttcttgttgtgcttaatgactaatgcaccaattacaattactaaagccgttacgattgataatgctggcaaaactacgtctggatggttctcgccatacagtacggtctgctgaaccactagaagtggtacgaagatgattgatagaaactcaaggatcttctcgaatgccatgcagaagtaactcagtgcgtgatccagctttgtttttccatactttctttcaatttcctttttagtcatttttctataagtaacctttcactccacgagttttccaaaatttatctaaatccgactttttccatcgtgtgatcccttcaattgtccgagacggaattttgtactttttacgccagcttctgaaagttgtatcgctaactccaaggtactttgctgactcaccaacattgagccactcacgtgaggacagctcgattatctttttcacgtcttttttatctagatttgatttaagttctggtttcatcgagatcacaatggatctcacaaacttagttaaattttcttcgtctagaagctgcatcgtttatcaccttcaatctgctacaattaaatcagccttcaataaggaggtgatttaatataaaatttgatgccgatactataactgccgtgattgctattgctgctataatttctcccgtcatagtaactatcgttaacaatgtgcatagtaataagtggagagaattagaaattaaaactaaacattttcaaaattcacaagataaaatttccactttgaatgatttagttacaaatttcgttgcagctgctaacgttcttaatacatatgagcaaacgggtggctggcaattaaaagccaacgccagaaatcaatttgtaaaaagcggttctaagttgctaccatatctttcacccgattatcaaaaactaatgcaagactggttaaagctttcgcaaattgatgataaaagcgcctggttttcgatcaccaaacacattaataatgaatctgttaatcttttaaatgatgtaaaaaagaacgcatacagtaagatcaattaacaaaacgtacaaataatatggccagcttaatgcaaaacctgtttgctttttgatcacttttcgatcaagcactatagcaatagcacttattgttaaaatcaaaataaaatataaatttttcattgctgaccttcttaatagatcgtggtatcagagccaaattcggctcccatcttttcaatttcttttttagtaatctcggcaacttttgaagctgatatgctttgcatgttggcttttttatttcttctctaacaatctttctgacttcttcacgttgctctggactaaacttttccatttagatcacgctcctgtctcgaattgattcgattccgtaaatttcttcgtaatacttatcagttctgtattccatgaacttgtcccacaattctaggcggtaatacaatcttcgtgctccgtcatgaataactgcttttttgtagggactatgttcacaatctcttgtacgtctcatcaatgtcgaccggctgattttcagctttgccatcatttcttgcttgtcagtaaatccatgatttacacccctaactaagtaattcaccacgacgcttcaattcagcatcgatcttgttggtttgctctgttaacttttcccattcttccttagtgatatcgagtgccattctttgaataagcaagtcgcataacttcgaccacaattctttagtggacatagctgctagaattgtcattttttattacctcctagacagatgtcactcattccaagttgatcacagatgcttgcgataatttcactgttgagatcttgaagatctttgatagttgctggacgtgtaacaccaccgttgccatcgaactctttaaccattccaaactctgtttttgaattattaagttcattgagtgcttcaagttcttcacgtatgtttttgtagcaattcatttcaatcacctcctatgcaatgtcgtcacgttcaatcagtggcaaaatgtcgttatcttttagaacgtcgtagataagttttctacctgcttgcgtccaataagttgtcgttctgcttcgatctctgccacgatgatcttgaaaagtgaatgccttacttgctacgtaacctttacccatgtatgccttgtaaaggatccattgaccgttgaccttatgctgaataccaacagatttcagaagcttgttaaatgccattgcactgtatccgtaatctgctgcgatttgagtagttgctagatcaggagtgccaaggatcacatcgagataactggcctttttgttactttcttcgagttggatactcaagtttttgttttctaatttgagttgtttgattcgagcatttgaaaattccaatgctctatgcataaccatttctgggctgttccatttacgctctaggtctaggaaatattctctataaagctttgacttttctgttcttgccatcattgctaattgcttagccatttcaatggttaataaataatcatctaactcacgaacagcgccgttgttaacaaccgtacttgatgtacacttgtaaaaatcctcattttcagtgaatagttctgaattagttttgaaccatctgctaaatcttccttttagtccaagacctttatgtaagtctcttgcactaacaagttgacgatcgtttttgacttgaactttcattagttcttccatttttgcactccttttcttctcaaaacgggtaactttatttcaaaaaaatatctggtgagatacctaatgctttggaaaaagctaccgcaaagtcagcatcaaacttatatcttccattaagtcttccgcttagtgtaggctcactgattctcaatttatcagcaagccagctctgcttaatgccatgatcacgcaagtattgcttagccaatgctcttgcgttgtctttcaagacacttgccatccgaccatttcctttcttctcatttcgtgtaactcgattacagttatatattactacccattttgagaagagtcaacatttttctttactttttgacaagaaatatttttaaatagtaaataagaatttacaatatactcagaaagagaagaaaacaaagaggtgcagttatgagtgtattcggtaatcgactaaagacaatgcgagaaaatgcaggctggactaaaacatacgttgctaacagactgtatcttccattaactacttatgcaaattatgaatatggtaaaagagagccagatataaacactattggcgctatttctactttatttaatacaacaaatgattacttaatgggcaagactgacgacccagagcctaatccatccaatttatcctctgatgacttggctgaaatgcttaacaacgtccgcagttataacggcaagccattcgatgaacatgacaaggaacttctcacaactttcttaaaaggactatacgctgacaagtaggtgttttatatggatagtaatttgaaaagattacttaaaagaaattatttgggagttgcttatttgcctattcacggtaaaggatatctagtcagaactaagggaaacaaaaaagactacattattgttaatgagaatctaagcgatgaggaaactgaaaaggttatccttcatgagataggacactacgaacacgacaaggaagttcttggcagttataagcacaatttaaggtcaagagctatcagtgaacatgaagccaacaaattcatgattcaccaagaaataaagagctatataaatcaaggctatgatgccatcaatatcaactacgttaacttggctgacagtctgggaactaaagattattttcaagttaaggaagaactagaaaagtattgtgaataattcgtccagggtaattggcaccaatgacgttaaacttcgtgcctagtttatggaggatatagaaatggcaaaggaaataaaaggtgaagatggcaaaacctatgtcgtcaaagaaaagaaaccttggtataagcgctggtgggtctgggttatcatcgtgattgttgcaatctttatcgctggcggtgctttaagtgatgatgacgatgatgattctgacagcggttcagcaaagacagagcaaactgccaagaagaaaccggcatcgcataagaagtctgctaaaactgaatcaagcactcaatctaaggagtcaaagcctaaggaatcaaagccaaaggttccagaagaatataagaacgctttagccacagcagaggaatacaacgaagaccaaccaatgagtaaggctggcttgcttgaccaattaacttcaaaagacggtgaaggttttacacaagctgctggtgaatatgctgttaaccacattcaagttaactggaatgaaaatgctttgaagtgtgccaaggaatatgaaaagaccgaacacttaattgatctcgtgcagacgtacaagatcaattaagtggcagtgttgatgatggtggcgagggtttcaccccagaacaagttcaatacgctatggatcatttaccaaagtaaagaaggcttaaaaatgaaacatagatttttagtagctgcattggcatctgtaatgcttgccagcggtactggtgcagttatcgcacctagtcattcaacacaagtacaagccattagcaagtactcacaccactggcactgggtaaaggtaaccaaggaaacaccaatatataaggtcaaggttggacgttatatgtatcaaagtaagttaactcataagacttacattgagaaaggatcagacttgaaggttatgtattccggtcatgactacccatggcgtgtatacggtggctggcgtggtcactgggttgctttaagacaatcagcgaactggttcaaaaacgaatagaaaacaaaaatcctgcctaccctattcaggtaagcaggatttattacacagttggttagaacgttagtttgaaaggatgatgatatatgcctcgtagaaaagacaatgagatctacaagtacaaattgaagtcgggcaaggtcaagtacggatttaaaacgtatattggaactgatccagaaaccggtaaggcagttaagccatctcgccagggctttgacagctacaaagaagcggaagcagctaagaccaaactaaaagaagagggtcctagtaagtttactcataagaaagaacagaaagaaaaccgaaaaacggttcaagaagtatatgagatttggctagaagtttatagagccgatgtacgtgggtctacgctaagaactcggaaatctaattggaagaacaacatagagaaagaatttggaggcgtatatatcgacggtatcgatattaaccacttacaaagctttgctactaaattggcggaaactcatattaattaccgttctattttaaacttattacacagagtaattaagtatgctattctacgtgattggtgcgacagagacccttttgataaaattgtgatgcctaaaaaaacgaaggcaaaaagtaagcaccctgctaataacttctatagtttaagcgaattgaaaacatttcttgaatgtgccaaaaagtataaagagaaatattacgtttactttatgacagtgggtaatttaggctgtcgcccaggtgaggcactggctttaaagtggaaaaatatcgacttcaaaaacaaggaaatttttattcagcattctatcagtacagatgaaaatggcaacaaaatctatggtcctaccaaaacacctgcgtccgttcgcaaagtccccttatcagatcagttggctatagtactaaaggagtataaagaagaaacaatctataaaaaaggcaatgattttatcttccacaaagataatggcgatttttatgagcgtagcgcaccagatcattggattacgacgctctataacaactatccgctacgaagaatcactcctcatggctttagacacacactggctactttactaaataatagaaaaaataatgcaaacattaaagatatacaatacttgctcggtcataaaaaagcttcaacaaccatggatacttactctcactttacaaaggaaaatgaagagcatgttgcggaatcgatcaacaaattggatatataaaaagagctttttacgtaatttttccgtaaaaagtctcttcactatagttattactgccgatttattgctgttaagcattgatatatcgacatttattaaattttgttttgcttaatatcaataatcataccattaacagctgattgtgcgccgtcattaacccacttgttttgacctgcttgtttatcaaaataaagcgagtaggtaattgagttaactaattgcattgctccttcaacatcaccctgctcccagcttctaatgattaactgtagcggattaaatgcgattcctttgtttgggtcatctaaatttaattcataaacatcatagccacgcttcctcaacgtatttacagaagcaacatacagttctcctttaggatcattcacgactagtgacgattgtttttcagccctacttactaggtcgatttgttctaatatagtagtttcacctttaccagaccgtgaagtaccaacaatcaaattatgaactgtacttgtatcaatgaaataatagccatgtttagtaataaatggaaattttggggttaatcctaatctattaatgtgagcaatgggaaacccaccaaaaccattaaagctaggctttttaggatctaaccctggttgactatgatcaggcacttttacataggtgtcttctaattccttaactgtagtaaaacgggcatttcccttttgcccatgagcgactttttgactttcaaagtgaaatttttgacttaacaatccaccaataattacgctagcagcaaatacctctaaaatttccatgggcttcaactgtgtcttaaagaaattcaagccagctaatcccgctttatctaaatcgagaccattcgtgaataagttatagtttttacttttagtttgtaacatgacattatggaatgctcctaataaccacattattactagaaagataaaaattcctataaccaacgttgttatcagcttcgtataattaaaattaatattgctagactgcttgttttcatttttgggacgatgtaattgtctttcaacttgatacaagcccttttttacaagattcttttccttgtttctagcattttttagatttattcgtgatcttctttttttagtacgcatatctagctaaccacccatcttgccaatcagcaatatcatagaaagccaatgcgacagcttttttagctgagttggaaatttctgttcgctgatcatcagttaaacttagccaaatatcccttgtctgagctttgtcttcattagcaatggcactgtacaaactagcaattggatttgaatatattgtagcaatcttctttaaatttcttgcgtcaccttgccctaataaaccatctagcatatctctcttttgtgcccaagtcttagtttcacgatattgttttaaaatagcttgtgacctagttaaataagttggagtagatttagtctttgatttagcattagttttttgatttttagcaatatcttttttagcagattgcttactacttgattgcttgtttttcttgacatgcgagtttgaacttgatcgttcaattgaagctttttgttcattattagaatggttattagtataagcccatgtaccacccaaagtcgcagctgcaaggcaaactaatgagataatttcagatttatagtgatgtttcttaggactgttatcctcggtttctggctttaactctgaatcttcttcatttgattcagaatcaattggtgcatcatttttcttagtatcatctaagtctactatttcaccatcaacatgtggcacaggcactaaagcattctttccatcattatttaaagtaatttttacgttaggattttctaaattattttgagtaattgctgcagcaattgctttcgcaaattcctcaggcaactttgccatattttcttgttgcaattttgccaaagactcattctgctcaattgctttttgctttaaatcaagttcacgttctttgcgagcagcttctgcttctcgctgacgcttttcttcagccttttcttgatcaagtagcttttgttgatttatttgttctttagctaatcgaactttttcttgaaccttctttaaattgtcttcaaataaatcattattcttgtcatagttatttctaactgcatgatcaaaatcattactaatggttgttctactatcatctaactcagaatttcgtttttgtacttcttcatcacgcgcaacacgttctactttagctttatcagcctttaattgttcatcaatttgttcattagcattacgagttttaagttcttcttgatcattaaaattttttagagctaaatttcgtttctcttctaattgtttcttatactcagctaatgctgcttcatcattagtttttagttctaatgccttattttcttttaacttgctcaagtcagactgattattttgcttctgttgagttgctttaactactaactgttgaatctgtgcctctgttctgccttcaacaattttatctagtgactctttagtaactctgttatatgcttcctttaatctatctacaattgcagcctttgatttcgctaaaccttcatcatatacacgttgaatatcctgcattgaataatctcttaacgcctgattgattttatcattcaactcttgttcatattgatctttagggttatctaaatatcctagatcatggcggatattatctaaagcaaattgatttttatcatatcctcttggtaaacgatcaagaatatcgttggcatccgtgtatttaccataactaattacttcactacgattagtttctgtttcagttgtttgacctgcttgaattggtaaagcatcaacctcttcaggtaattgtgtaggaacattattcaaactaggattggttgcggcattactatttgattcttctgttggactgttatcctcagtctcatcatttacatcattttcaggaggtatttcatcacgcacttcatcatctgaatctagaatttgattattattaaacatgaacccattgtctttatttaaatcctcttcatcatcactcaaactaggttcaagttcattaaagatttgatcctttagtgttgttactgtttcttcttgatcacgagttaaattttcattctctaaatcacgatcaatcaagtttaaaatacccccgtcttgatcctcaggtaaaatttgtgcttcaaagctgctctcttcacgatcctcatcttcatcatcaaagatagtaaatgtaacattagaatcagcttcttctaagctctttgcatagtctttaactgcatcatctgcagttttaatgtctaactcaggcgatttcctacttaatttatgcttaaattgaaaatattttttcgccccttttggtaccttatcaaaggtaactaatagcataatcttctctccttcttcaacgcccaccatcaacccagtaagtcttacttacttcaccttacttataaattaactatctagcattccaaccaaacatatttgcgaatgatggtactaaacttgcagctaaagcaacaatggcaacacctaccagtgcatacatcaataattgctttgcattttgcgacattctgttaccaaaagcaaaaagaataccagccaagataataacgacaatgaacagacctttggcgatattcttcaggttcttttcggtactaccagtagccttattaatatttctccaaacatcaagtaaaactggatgttcgtttaaaaaagcctgggtaccgattaagccgctccaaaataagtaggtcaatttggtataaacagctaaaaacattgttaatcctccttgtataaaaaaagcatttagttagctaaactaaatacttttacttgtcccattaaaatcacttgtaagcttattatcatcttttgatgacgtaaccttatcatttaaagtcttatcaggttcagcaatctgcaatttttctaactgttctgataattcttttttacctgcgacttctaaaactgcatctttatatgcgcttttagtgcctgagatcaaatcttgcacaaactcaaccataattttttcttcccaagccttttgtgttaagccttgggaattatgtagcttgcgtaaaatggacttgtcttgtttgctaagaaccatttttcctccttaactattgcccaccatctcacccgaaagaaaaagaaggattagactttctcaccatttcatctaatcctttatacgttattcgtctttgttacctggtaatgtttcagtttcacgcttgttgtctttatcagtgtttttattcttgtccccatctcctgttgggtcaacatcttcactggtatagtcgcctgaaacctcgatcttcttatctgcagaagcctttggtgtctttggcgatacgtgagtaatattacttggaatatcttccttgttgaacaagaagtgtgcttgatttggtacttcaatttgtccattatccttgttcaggtagtcaagcaatttaggagtattgattaaagtagtatcaatgaacatcttcaagtgcttaccatgccatttaccaggctcggttgctacccacgaaatcttaccagtcttattattaacgtctaatttaccttgatcagtaatttcttttgctttaccagcactatctttgtcgtcatagtcataaaccttaacgctcttaatgttttgaacgtctgcttcgatagcatccttaattgcaagagaatcaacattcacattatctggtacagtagcttctacgcggtaggtatatttcttgccaaagtctacatctctaagtgacttagaatcggctaatccatcttctgaaacaaacttttcatcctttggattagtaaatggaatattagtagttacttgattagaatctgcactaccattatcttgaattactttggcttcattgtaaattacagcttgatctttatgttttggatctgcgtgatcctttaagctctcaccacgctttacagttgcatcaaaggtaatcttgtaagtttcattgtagaagtcatccattgccaaagcatcagattttgcaattactgataagttattacctgaggataaggttactgtgaaattgtaagtaacatcttgatttgcacggttataaactctaattgagcctgtatcaatattcagaatattatctaaattatcagtgattctatattctgtatattttaaacgcttttcaacatctggtacagaatgtgtaatttgatagtgatattgttcatagcggttatcaagcatatcatgagttactgatttaattccaccgacttcactaggtgtatcagttccttcatccttgtcagaaacatatttattaggattcattggtttatcttttacaattggcatatcaaacaatcttaggtaagcatggttaaaagtaccattccagatactatttgaaatagaaaccttatccttatcagtcattccagcatcaggatcatatttaccttggttcaattgccaattatcagtatctgcttcaatttctgtttggttttcagctgcatgttttcctgttgtagtaccaaaaacccaatacatattaatatggtctgtgtttgacattgttgctgtatatgcagccttccaatctgaggatcttacagtacctgaaccatcaggtaaagcggtatggtgttgattggcatctgaaaagatgtaattattgcctaaagtatttttataacttaaccaagtattaccatccttttgtccatcgccccaaataacttggtcaatcttaccataagttgatgtatcatagcctacccattggttaccatcaatatcacgtacactttgatttaagttcaacttcaaaggtttacctgtatcatgatcaataaaatcaattctataagcaaccgcaccttgtccaggtgtgaaaacttcaaaatatggacttacaccaaaggcaattgttggattctttaatggaactttttcacgtttaccatcagatgtatcctgccatttgtaggattgaatattccaatctgttgcggtgattttgacatcaatagtttttccgctgttaggatcaacaccagtgtttgaataataaacaccaattttcccagctaatttttcatttcccataacagagaatgcataccaagagtgatgtttgtcttcagtattagtacttgaagtagcccaatcttgtgacgcaccaccaaaggcatggattttagttacaccctgaataatcttgggaataaaggcatatgaacctgccatttttgttccaactgcgttttgtcctttcggcaaatttaccatttctgcattatccgcatgtacaatgcctgatctagtagcaagaaatgtgcccagactaaagccagtagccattagtgcaattgcggctaagctgactactttgtttttcttcgttagagaaatcatataatttcctttcttttgagtaacaaaaaaagaagagccgtttttatttgtactcttctttatacttaattattaaattagattatttagttagcattattccaagcactaacccattctgggcttgtaccatctgcagtaaagaatgaaattcctacactactaccttctccatcccaataataatgcatgcttaatgctgcatatgcattatgctttttccaaccatataaaactcttggctcgattccttcactatttttcatcatatcaaataatttatcagcgacttgaactggtttccaacctttatgagtaaaatctccaccaattacaaagcctttatgattcaaaccataaatagttgaatctacatagccaacagcttgatccatacctaactttgttaagcctggaagatatgctcttatttcattaatattttggctaattgtatcagaaaatctactaaattctctagtaccaggtatttgtgcttgttgtgctaaattagtcaattctgaactagtcttgaatgctggataacctttagatacacggtaattttgaatatcttgccataaacgatcttcaatttgttgaacctccgtatcagtaaagtatacatatacattcattttctttctagctaatttttctgattctgcagtcattggaccatctacaagtgaactcttcttagtgttatatcttacaccagaatcatcactattagtatttataccagatgacttagatgaagaactagatttcgaagtagtagatgatgtacttgtttttgcatgtacactattacttgttggaaattctcccttagtactggattttgtaaatccattattagtagtgctcgatgacccagtattataacttgaagttgaacttgtattagtagaagcaaactttactacgaaattagcagtacgaacatatttgttcttgccaatcttgtaatatttcttgcccttaatcgttttcctaccaaggatttttacaagtttgcctttctttaatactttcttaccaacacgtttaccctttgcattataaatataagcattctttgtcaacttctttttataggttgctgcttgtacaacggttggggtattttcaacattattattcactaatgccacagagctaacagataaaacagctgctgcacttaagctaaccaataatcttttcttcatttctagtatcctccaatatataatacgtggaaaatttattttcttttttctacctacattatataccgtttttatgacaaaagcagcagctaattacttagtaattttagtaattaaccctttaatcttattcttaaattcatcattagtcttatacaaataagtaccaattccaccagccattgcaactaaacttgcaataatccagcctgcatgttgcaagataaagtgacctgttcttggcaagaatccatttttacctgtaatagggttatttgatcctggattgtttgttcctggattatttggattattaggattctctgtgctattcgtaggattcttaggattgttgacgttgcttggtgacttcttatctgcttgtggtggaatgacattaactgtattagacttaacgtctttgccatttactgtcatatcagcagtgtttggtacttcaccattaaccttagaatccttctttaacttagcagtgatgttagctgtaaatttcttaccgcccatcttgcctactaaatcagccttaggcttccatgagaacttttcagtattcttatcaagcgtaagttcaccttggctagttacgtcattaccatcagcatcagtaatggttaccttttcaagatcaaggacatcttctaagtcgtccgcaaattcaacagatttaacatcttgtttatcaccgacagtgtattcaaccttgtagtcaaagtctttgccttcttgaaccttatctgattcaccccattgacctgattcagccttaacttgcttatttaccaagtttccatatgggtctggggtcttaccatctggtttagaaggatcgttaggcttatccttcttaggatcttcagggttctttggatcaccattaagcgtagtatgaacaacattagttggaatatcttgaccgttaatttgcatatgacctgtattaggaataccgctattgtcatagcttgatacatctgcattcggtttaatgttagaagcaattgcaacatatagtttcttacgtgagaacttagctggatcattagcagtccaagtaaagctttcatcctcatctgaagtaactaacttaccttcgttagttacattattaccatcactatcaatgatgacgacattctttaagtcaagcacattctccaaatcatcacttaatacaagtgatttcatattttgagaattaccaatatcaaacgtcaacagataatctacagcatcaccacgtgaagcttgattgctatctactgttgaagaattaataatttctttcaaatcttccttagaagttggagatttagtagtaacttcactagcgttttgtgatgaagacttaacaggattcttgtacggcgtttgaagaatttttacagcttcttcatattgcttgtctgttaccttatcgtttgccttgctccatacaccagtatttggatcgactttaacgtattcttgagccttttgatagtcctttggcaatgcaccatcatcataagagtcttgccctgaggaagtttcagacttgttgccaaagaatttcgtccaatctgcaggattcttaacaattcctttatgcgtcttaggttcctctacctttggggtcacaactggagtatttgatggggtgtctttaccattcgccttaaagtgagccgtatttggaatttcgatggtattgtttttaatatacttttgtaaatctgcattgtctttgactttagcagtaacttcaactgtatatttcttgccaggcataaccttaaccaagtcagcatttggttgccagttaaagctttcattcttttcatcaagcttaagtgtaccttgttcagtggtaatatctttaccatcggcattcttaacaactaccttttcaaggtcaaggacatcttctaacttatcggtaaactcaacatcggttaaatgttgcccttcacctgcagtatagtcaatcttataagtatagtccttgccaacctcaacattatctttatcttcatgataggaacctgatagtccctgaacacttttaactaccttattttcggctggaggtggagtttcaaccttaacaggatttgaaggaatatctttattgttgtacttcatatgagcaacattaggaatttcgtaattctttgttgctttattcaagtatccacttaaatctgcatcggtcttcagcttgacagtaatatctgcagtgtagatatgctttggcatttgagttagatattctttagaaggttgccaagtaaaactttctttatctttatcaagttttaaatccccttctttagtaacttcatttcccttgtcatcggtgatcttaacgtcttcaagatcaagaaccttttccaaatcgtcatagaaaacaacattactaatgtctttaccattttcaggaattgaatattgaactcgataatggaattcatcaccagcgtcatgcttggctttttcaccatattgaccgttcttatcctctacttgcttaattgcagtaggttcttcatcattcggtgtatgaacataaacaggtggggtcttgatcttttcatcgttatagatcatttgaccaacattaggaatgttgtattgattcgtattcttatccaaatacttgtctaagttagcattcttttgtaacgtggtttcaattcgcatgcttaacttcttacctacccaatcttgaggcttcttagccgtcatattggttgtatttgtacccttatcaaaatcagccgtaaattgatcagtaacatcagtgttaccatcaaaaactctggttttattatgagtaaacactggctccaatttatcgaaaagaaccaatttctttagatctacattgtatggaacttggtagtaaatatcaaaagcaatatctgatccctttttaaaagtagcatcactcacatatttcacatcagctgttgcatcagccttaacaatattagggtttgcattatggtttgcgactgctagacctacgcccacactacctagagttgctgttacacctaatgcagatagcaattctctagtttgcttttttgatagctttttcaaggctattcctccttaatttaacaaaaaaaacacctgcatttttgtcaatgtcacaaatcaaaacattgattcatatgtaggtgttttctaataatatataattattggcaattacttgtcttttgataattgcttgattttgatagaaaatggtttatttgtaccatcttctaaccatgcataatcaagttgtgcattttcactatcagcgagatcattagctttttctgtatcatagtgtaattcaatattattgtcatacaactctcttaagcaagcataaccaagaattgccaagaaataattcttatccttagtcttatcttcaaagacatctggatacaaacgactcattctttccattgcatcaatatattcactttccaacattacggtttgaaaagcataaggtctatctaccgctgtataaggagtatatgctacatatggaaaacgtccatcatacttgctagccaaaccttccgaatacttaaggaataaccagccagcccacagaattcgaactgaagccactcgattgtcttttctatctactagccatgcaggaaacctttctttaataattttatttgtatcagcaagcatagcttctggtaattcaaaatctacaaaaacttgttttgccataacattttcctttctaaaaatcaaaggagcctctaacatacttagaagctcccttataactttctgagccagtgtatttaccacgaataaaaagtctaccttgacctgtccagtcacaggtaaacaacgaaattactggcttcttcttaaactctttattattccaagctaatcttaaattataaactgaaataaagcgtgaagatgtaatcttgtaataataaactttcttataatctgttaataagattgttgttccattaggtagatttcctcttaccttcgcagtatataatgggctaaagaacgaacgcccatcatccatattatgacctgctaaagcgtaattgccttcacccatcctctgatattggttcattgttcctgcacctaagttcagttctacattaccaactccacgatagatatttaatagaacattatgatctcttattgctatttgtcctacagctcgataatctcttctatgctgatatgcattggcaagagattgaggtgatacaggttggacagccttcatattaaaacttggctttttcttctgtttgttttttctttgactcgacaaatgattagttgctacatagttagcagcttttccttgaagatgattaaagtttgcaatacagtaaatcgcaaccccgattaaaattagtgcaacaatagctactattgtaccaatttttttctttttatcactttttcgctgttgattaatagctaatctacttttttttattttcatttttaggaacaaaaaaaggcaattagcataactaattaacctttatttctaatttctacttagcagcttcccaagccttaatccattctggtgaataacttcctacaacggtaaagtttaattccaaacagtgatcgatataatctccctcaccattatatttaactttcaaagcagcataagcgtatttatctttatgtccttcaagagttcttaagtccataccatcttcttgtttggtataaacattaaagatttcatctgcaacctttttaggatcttttgcctttaaatcaaggaaccattgcttcagattaccatatgcgaaagcatctaaatcagtcatacttctagcactatccattcctaatgcttttaattttggcaaaaattgtcctaaggtatcagtattttgaatagtaccgttaccataaccagcaacattgtactcaggtgtacccttttgcattacccgatttacaaaactagttagttctggattagtcttataagctggataacctttactttgacggtaagcattgattctttgccacaaatagctttgaatttgtgctacctgatcatcagtaaagtaaatataacctttttccccagctttttcagctgcagatttagaatcagagctattatgtttattttcactactattatttgaatttgaagtagatttatcagtagtattacctactgcagtatccgtagcattattgtttacttggttattagcaccttcagccgaagttgattgtgcatttgcagccttgacgtattgaccattgcctaaggacaagtaattcttgccattaattgtcttaacaccaactacagtaaagacgtggttcttctttaaagtatcagtgcccttgattcttttgccttcagcgttataaacataagcattatgagtcaaatagtattgcccactaactgcattagctttacttacttttttagcaaaattagcaaccttaacgtattgattcttaccaatgcggtagtatttcttaccataaatcttctttgtaccgagaatcttaactgttttgcccttcttcaatactttcttgccataacgattgccattactcttataaatataggcattatgagtaagcttgccattttttactgctgcttgtacaacatttgtattattagcaacaccatttacttcattaacacctactgctccaactgataacaatgttgcaacagataaacttactaatacattctttttcataaacataatttgctcctctttccttcaaataattcagcttaaattactcgctaacttttccccgctctcacctgctttcattatactacatacgcaacattatagcagcgggatatccgttaatttttattattttaaaatatactcttgcgtacatcttccaaaacgatcatatgtaaaagataacttcacttgatcattctttcgggaaagtaatgcacgtaatgctaatgtttcttttcgccttattggcgtgaattctttaggatattcctttgctaattgattgcgataacggacatactcatccgccgttaatcttgtaacatctaattttttcattacattaaccaatcgatcaacgcaatcaaaattattcataatttttcatcctaatcccatttaaattgtgatctctttaattaccaacggttttgcgctatgaccgataacgatgatggttttctagttagccaccaaactgtaagcttttgtacagtacgtagcagatagcttcacctatctctagcctctcgcttcacgcattccgcaagctgtcctcttatcaatcctaatcaaagactctttcttgcccttcagttactacaacagctatgaaaaacatatgcaaacaactacattgtatttatttgtagtcattatggcttaacatgcctatgcttttcttatcaacgtcttcatcagttttccgatattccaacttgggagtaatcgcattgaccgactcttttgacttctttttcggacgtagcttcgcccgcattctttttataaggctttatttaattctggatgttttaccagaattattaagttgagcatggcgttttcgtcacggtcaacttttttattatagttacggcagttcggattataacaaacaaattcattatgcttggtgccatgcttcttattgcctcttaaagtgattttttcatcgccttttttcactaatccgcaggctgcgcacctttgagttgaagggtacagtttattggctacgatcaatttcttgccataccattcgcatttataagtcaatatctgtctaaatctgccaaacattgacctgtgcattcctttggaggcaacatgactcataagcattcctttaacgcttaggtcttcaatcacaatagaatcatattcgctaaccagctttgtggtaaatttctgcatcaaatcattttgaatatttttagcacgagcgtaagctgcttgaagcttgtttctcgctttcatgtagcgcttgctttgcattcctttgattttaccattgacgacacgctttttagacagctgtctttgataatgcttgattttgcaatagactgctgctaacgatttgggcattactatgcattgaccgtctctgtaattgaaatgtccaacattgatatccacgcctgtatatctgcctgtcttaggcttgtcttctggatcagatattttaaaaggaatggatgcatagtatctgtttttttctttgtaaaagctgattgttccgaaatcatccgacaatggagcagagcttaatttaaagccgttccatgtttctttgacagccctaggcttttctaaaaataagcagccatccttaattttggcctgatccattttaaatccctgcctaggtgcttttttagacttgaattttggctttccccagcctggctgcgctttatcaaaaaaattctgccaagcattgcctaagtcttggatcgccaaattaaagacatgagctggaagctttgtctgccagtattgcttgttttcagtcagctcatcacgaattctgcgccaggaagggacaggattgtttgcgagaatttctctttcagcgtttgtaagcttttgtttttttctaggctttttaagttctgctttaagatgctgggttaaagccaattgtctggcttcatgcatattttgccaggtttctaaaccgagattccagctgaagcgtctgtaatcacaaagcgaatcaagaaccttcttcatcctttgattgggttttaatcgatatgttctggttttgatgatcactcttttcaccttccttctttaaatcccgcctaatcttcctgccgtaccgtctcaacccataaagccgacatgaaaacacatgaattactgaaattaagtcttcaaccatttcctcatctggagaggtttcagggttgtttaaaacaataattttagtatcgtgcttagcacaaaaatgttcaaaccaatcaaagccaaagcgggcaaaacgatctttataggtaacaaagattcgttctatttttcctgcttctacttcatccaataatttattccattttttgcggttataattaagccctgatccaatatcttctacatgttcatcaataatgatgcctctagcattggcatattcaatgatgaaagccatctgatgcctaagattttctttctgacctacagaagaaacacgggcataagcaactgtcttgcggtgaggcttaatgcccctaaaagcatccagccgctcttgcgtatagtatctgcgattggcaacattgcgctgagcaactagtcttttttctcgatcccatctttgcatggtagagcgagatacaccgagaagcttagcagcttcgccaactttataaattcttgacataaaaatagacctgctttctttgcggtcaattatatcattaataggcatatttagatatattaaatacataatttactacttgtgattaacacttaaagagttaagtttatcgactcacttactattgttgatcacattccgacttcttatttactcttgagtttttcatcaaggtattcacatgtcaaaacagccaaaaagaatgtatgcttatcttttagtagcctattacagccattactattactttaaatttaaaatttcgttcaaactaagacttatcatcaagccaaaaataatagtaatctttgttgatggacggctattcccatcttgacgggtgtgattctttcttcttccacctttgtgtgccttcaattctctgtcttgcaaatcctattgagtcggctcaatagtcatgcacacgtcctacgcttgttgcaaagcatagttgacgcttattctgttttcaatgtactaatggactgtttaccagtcctaaaagaaatagctgagttgaacagctaaattattgatcaaaaatcaataattgtaccgactttcttaatgattaacattctaaggattttgcctcttttacttgatttgtcacgactactgccacaataattgctcctgtcacagctaacgcagttaaagcaaacttgctaaactttttcacgtttttcacgtttatcatctcctctgattttcgtttacccatttcttcaatgctgctttatcaatttttccttcttgatagcttctcaataatttcaaataattgcttctagcaacttctttttgtgtaattcgttgcagtagcttttcttgttgcttcttggctttcttaagccccctattaacggaaaaacttggtgggaagccctgatttcttgcgattgtttcattaacttctgttaactgttttcgcaaatcattaatttgactatcatacctaataaggagttctttaggattatcatccatatttttcttcaaatttttcatgtttgaatacgctcgccagacgtaataaacaatataaatacctactgcgactgttattaacttatacatatttttcctcactagattagagcggaaagattcgaactttcattgcaagtattaagtattgagtattaaagtattaaaaatagggatatatatgaatagcaactttttgattcaaaagaggagcaactcctttaaccaatattcattccaacttgcattttacctattaaattacgccctagttttacattaaatagctccagtaatatccgataaataaaatcatgatccatagaataattccaagaatcgatagcagaactgtcactaattcatccaatttttcaaaaaagttagcaaaccttgtgcctgctaaacttggcaaagatgatattgccataagaataattatgaataaattccccgctccaaatgcgatcactatgtatcgaaaatgttctaatataaatgaactgatcataatatcttacttgctaacatcaattagcggctttttcctatgatgagattcaggatattttcttttacacaataacctgcgatgtcctaatttaggatttacttcaaatccaaagcctaaataaatttgatcataaatctcacttactcgataaaaagttacttttttatatccagtattgtatttataagactttagagacaaaaaattttttggattttttataaataacccgtcaatattccagtaatggtacccatctatcgtcagaatttcataaacttctttttccactctgaatacgctaaagcgtctattttttactgatttttttgtcatccaatactcaccaatcacattatctccatcaaaatggtaaatcagcatctgttagttgtacttctttctgacttccaaaaggttcttctgccaatttatcttttttgtttgcttccacaatggtacggtcagcttctggctcttcatcatttgcttgatttgaattctgaggaatagcttttgtagactcttcattttgacttgttaaaacatcaaatgaattaacccagatatattcatatgcaaccttattaccatttttatcaataaagcttctagtcctttgttcaccagctagaataacttttaagcctttatgtactttagcaacgagattttcagccactttattccacgcaattacatggtgccattcaccaatatagtcttgttgaatcttgctataacggttttgacaaatagtaaaggctacatacttttttaaagattgggttgtctttaactccaattcttttccaatgtagccgtcaattacaacttgattaatcattttttgttcccctcttttaaaatgttttgctatttatattgtatatcgtttttacgatatttcaagcaaaaaacaaaaaatatacagatttgtagaagaagtaaagcaaaaaagacgctaacaaacttggacagtttgtagtgactttttagtaaattcatacttttcttcactagcttcatggataacatttaagagagcttcgcttttattttctcaaaatatttattttctatctggctaacataatttctcatatattcaaaatctaatattccattactcttaacaggtaatttgaattccgcattataaaaaatgctatcaacatttcttacagcttgtggatcaaatttcaatgccagtctttgcagccatggtagtagatagagtcccactttttcatctatttcaaatttcggttgaatgacttttataaattgcccactataccatgaatcattttgataatttacattcatttgcattaatcccaagctaaaagttttttctggattaagatgttctttatcaatgaatcctgtataacaatcaataccgttgttatttcgagttctcgttacatatggataattacaaggcatatctttatttaatgatattttatctaaatgtggagcggaataaatggaaaatagttttgcagaagaaaagcttttaaaattttgcatattacacctcttaatccaaaattttacctaatttaaacttcatataatttcttattgctttatcccagtcttcttcttcaggagttgtatttactttatagtggttttcaaaattccaatctgtacctgtattatctattacatcctcgacatattgtttctttaaatcccataactcattatgaaattttgaattattaacggctgcttgacctgattttaaaagcaataaaagatcgtgatacctattcgcaggactgctgattgtcttaatcccacgtttggtccttttataaccatcatttctaaagtctataaactttacgcccctatcaaaatcatgtgggaccccaacttcaaatatgtaaattgacgtacttacaatagcattaggcacaaacaaatcagaaggcatctttatagaagctaacagtgtgttgttctttaaaatttcctgattagtagttctagacttgccgcttcccgcactatcttgaattataatcgctgctttagcacgctctttattagacataaactttaatccgtatgctaaaaatggcataccataattgtccgcactaaatggaggattcaataatagcttatttgcattgaattctgtatataatttagttggttctttaaaagtatcacctttctttatttgactagacccatcaccacgcaaaatcatgtttgacgcagctagcgtatacatttttgcatcatactcaacgcctaacagttgagactttttgatttgctgaattttcctattcgctttttcagaattagacccatatgtgttattggcatcatcgatcattaatttcatgctagaaactagaaaagctcctgatcctgtcgctaaatccatcaccctatcattcatacctacatctattgcctttgccatcagattagttatgtatggtggtgttaatactttacctaagctacctccatcacctaaagcgtactttaaaaattctgaatacattgatcccataatatctagagaaccactgtccgcatcaatctgtaagaaaatttctttatacagaaaggtaaatacttgcttagttatgcttgccttttcagtctgaatcatctttccaacaattttatctttatcaattagcttatctctatctaaatcggaatgaatcgctccttcgaaagaatccatcattaacttttgtttatcttgagtaatatttcctcgtttatttaagaaatcacttaactgatcgattattttaatagaatcgctttgtttttcgctttggattccttgtaaatcacacggtgttagtcctcccgcaatgtattgacctgttttagcatctgtaaccttttgcattgccaaaagcatacctgaaacatatacaacacgctgttcagttgatatattcaaattattcattagtttattcaataattttgcttttttttgcaatttttgctgtgatttgactaatacctgatgcttttcagtttcagttaatagagcattatttaggaaatcttgaaatgcttccttggtggacaaaaaatgtaaattatcgtattcatacatacgttttggtttgccattgacagcataaacataataaacctgttgcactacatgatcaggattatcaccagcaacacccactatgatacatgacttatacatctttgatttaagaattgttctcgcataatgtaacgcaccattgacagcatacttttttatagctgattgagtcgtagaaatcctacctttagcatctaacttgattagatacttagaataaagcttattttcaaagagaacaggaacatcgtattttgttatattaaaatctggctcaccaaagttagttttatttagtgttttagctccaccttttagtgcttctttcagatactcgtccatatatgattcaataccatagtcttttttggttaagccaatctcttcttccaactcatgctcaatatagtcatccacttgtctttctagcttgtaacctaatgtatctgacatttatgccgcctccctttcgaggttaatggcagcacaaaagagcgtatttaaaatatatacgctctttactaatcctattaatagttcagataatcctaagatataaattttacagttgagatagctgggggctgtaccccccccattctggaagttattctggatattgttattttttgttagcatttatcttctagtcctcttattttttaagctgtagttagtggcttaaatgttattactgcatgcaatcctaatcctttagcatatctattaagagtttctaagctaggaattgaagttaagttttcaatcttagcaagttgtggttgtttcataccgattcgtttagctaattcaacttgagaaattccttgcttgatacgctgagcatgcaggtaagctaaactatcaatagctgtcatttcttcaggactgatcgatgttaattccttttttaattcgttccaagtagtcattcttattcgttcctttctaaccaatcatctaatctgtcgagggcttttgctatttctcgtggatctgttttattgttttttttagtgtaatgactcaatataacatatctgtctttcttccaaccagcatagaaaaagcgctctggtaatggtcgaagctctagtaaaggatgacgataccctttcagaaatctagactgaggcattcccatatggttacctaactgttctaacatgctaacttgataagaaaattttgttaaaacctgtttatcttgtttttgattgcttcggtctaattgacgaatatactccttcacatctgatcttccatactcgtcctcataaaaatctacctgatacatttcaccctcatataactaatttgatatatattgattatatagcaatcaggctatgctatcaagaaaaagtatttgaaaaaattaacgtagtgaaaacagttattacttttccctcgaatcttgtgtaagccttctaaacatcttaggattaggtaaactgataaatatcttgctgtacctattaaagacgtacggacacctaacttcatagccttcatatctattagcattgctgatttttgtaacaaaattagtagtagagaatacttgtcttttacccattattaaattagatattgcacttctcccctctagtttgtcatataagtaaattgaatcgctatgtttatactgaataatcccaatgtaatttgtagtcatgtagtctaagttagctttttgcgctaatttatgtgctttaacaacactaattattctttcattcgtttcattttccgcttaatccaagcaccccccatagataaccccttaattcctagaaaaatcacaccaattatcagtgcaattctccataagccatccatcagtgttaaaagagctggaaaaaccaggtaaattccgaaagctagccaaaccaatttccagagatggaatgctgaagcaagaataaagacccaaaccataatccaaaaccaatctgtttgtgaaagtactaaaaacatagcgttctccttagcattaataaactcttattacctttgtctgaacttgaggaatattacctctagtattgataactacttgcaaatcggcttcaatttgccttgcttgcttagccttaaaaacttttatttgatttttaggtacgattgccttaatcactatagggggatcgtcctcaaaagaatgatgatcatttgataataattctagcatcgaacatccttgattcatatcaacattcattactttaagcgagacagacttataattcacagtttgtttgtctcttttggtaactctattaacatacttttcttctgcgtctgtcttgttaaagactactgctatccaaatcaaactcgtaagaaagtaagccaaatatatgcttaaaaataatttcatagctagctcttttcaactactacgagccattttccttcaccaacatacttaatcttttgattagccttaatgctgataaaatgaccattaagctgcttaacgcgaacataaaagctattactatccaacggttgaattccaagcacctcacttctaaagcgccaagtaaaaactttagctaattctgcaggtgtagctagcattccaggatataaatcatatttattcatcatgaacccccgacatattcatataatctacaaaagctttctcaatcaatttacccatttttgctagatagtctgggttataaattctattgtttaatacttctggactgtttcccattaagcccaatgcttcccctgctaaatagctgtttaactctagcttccgcttactactaagtcgttgcccatctagttcaagatcatctgccatgctaagaaacgcaatggaaaacagtctatcttcaatttcttgaatatcaacttttccatcaagcaagtcttgtgcaacttttttatttttaggattcattcttacaacctcatatccgtctaattatctatttatcaatatcttacgatcttatacaaaagtatcgcaaaaatgatatattaataatgatttactacatagaatttaaatttttaaaggggcatattatgaaagataaacttaagcaatccatcatcgcaattactagtgccaatctcaaaagaattttgtacaatcaaaaactaactcaaagagacttagcagcactaacaggaatctcgatcccatcaattaatcgctattatttaggaaatggcgccataccacaaaataacttggtaaagatcgctaaagccttgcatgtttcacctaatgaacttgatccttcatatcagcccactaaagactttttatctcaactagctgaaaaaactgatgacccagatttaaaatttagaactgattatcttaaacagttaattcagaccagcaatttatctgttcaggaaattgccagtaggctcaatataaagcctattacagtctataagtggctggcaggggtaaatacccctagcaaggaaaatacagccaaattagccgatttatttagcgtcagcgttaattccttagcagatgcctctaaagaaattcgattaactcctcaacagagcaaaatattaaacgctctgccatcagatttaaccaatcagcaaacagatctaatcatttctctgatcaaatccgttttataaaatgctaactagttttcgatagattcatacatgcttgaaattccactaattagtgctagctggcagttaattctccattgccaccagttaagtatgtattcgacttgatcatttgaatctagcatggttactgagctagttgatacttgcaaatctgaatcttctaggattgttttaatttgaattgcaagattatctgacgttgttttggtttcttgcttaactttaaggtgattatcgcttaaaatgtcgcttaataaacgtgaggactctttcaaattcagcatccaattagaaggcaacaagtcgtcaatagcgtaacctaactcatctactttgaatataaacttttcaaaattttcttttttacctgttaattccatttatttctcccaactgattaaatctatagctctttgtggagcgttatttgtttacatgtttttgcattttatcttagctggtaatttttgcattccagtcaatctcgtgttgatgtttttgcatccactcacaagcttctttagcaaaaataattgtagttttaccagctggcgtttttctggggtttactacgaatccaccatttttataatcaacttctggaaattcatcgaaaataaaagttcttacccagttatcacctttgccacgacaacagtattttctaaactcatcgatattccaagtcttgccagttaagtcttgcttatctgcactaacagattcttttacaatacttttaattagattcgtaaggcttggaaggttgattaatgtgtcagacatatcttcttgcattgctatccccagctttcagctttcataatttctatcatttgctaagccatctctcagcatctttaacaaatagctatatggtttgcctaccatgtcccatgacattctttccttgaatttatccttaactgcttgcaaagtatctacgttgcattgatataacagcccccgtaactgtttaagctcatcaagtgttggattggtagaatgattttttagcttatcgttcatccttgcaatggtaaaaaactctttgtagattttttctctttctggatcttcttctttcttcgcagaagaagatttattaactgttctattagatgatctattaatactgctatatttatgtgacgctggtgacactaggggcatgtcatcaatgtcattaccctcatgacactcagttctccaccctagtgacatatgtgtcatgagggctgatccagcatgaatttttcttcctaagactgcaccatttttatcactaacaactttttcacgctcaattaattttttcttttcaagcaagtctaaatatctattcacttggcgaatagatactcttaaatgctctgctatttttctgttactcatgaaaaactctccagtaacattaagcattgagataatctcacccattaaaagtattgatttaggtttttttagtaaatcctcatctcgtgaaattgatggtggaatcattaaaaaagctctaacacctttaaattcattttccattcagtttcctcttaaccattttaattagttatatgattcaattcatttagtattttactattttaaatagttaaaagcgctaaaaaaaatatcgtctttgctaactccaaaataatcagcaattttctgcatcataggcggtcttggagtagatctgcctgtttcccatgctgatactgtcacttgtgttgtacctaaagcttgtgcaagatccgattgactcatacctttttttactcttaaaatttttagtttagttaacatttgctacctccctttaactacatttatatattatactaatttaattagtaaatcaaggcaataaccaaattttgactatttttattagtatttaactaattttattagtattagtagtaatataagtataaattattagttaaggagtctaggaaatgaaagattatgatagagcaatattagcaaataacatcaaaacactcagaaaacaaaaaaatttaaatcaagcagaattaggtaaaattttacatgtttctcaacaaaccattgggtcttgggaaacaggtagagcaattcctggatctgatacactaaacatattagctgactactttcaagtaagcactgatgaattactcggaagaaaaacatctgattctgtaaatgactcggacttaagcaaaatgattgaaaatgctagattctttgatggtaaacctattgatgatcatgataaagacctagttcgaggcatcttaaaaagaatttataatgagaaatagaaaaaggtgtgcattatggacactgaactaaaaaaattgctcaaagaatcaaacataagattggagtttgctcccttacattgcccaggactacttgtacatggaaaaaacagcaagcctgacgtaatgataattaattcaagctatgatgatgaacaagctaaaaatgtaatcttgcatgaactaggacatatgatatatgacaaagatgttcaaggagattaccaaactaatgattgtgctcatacttacagtgaacatggagcaaattcttttttaatacatgaaagagtcaaacaatatttcgctttgggtaacgattttcaaactgctaattggttagactttgctaaaagcatcggcacacaagactactttcaagtgcaagaagaactaaataaatataaatttaaagagtgaacatatgcttttaactatttcaaattatttaaaacgcccacctgctcaaacaagtaggtgggtgaatttatattaaaacacgtataagtaatttatacgtaacatttaaatagcatataagtaatgtaagtgtatgaggtaatgaatatggcacattttgaaaaaagaggtactaagtggcgcgcacaagtatcttggtataaccctcaaggtaaacgtcaatttaaaactaaacaaggctttttaactaaatcagcagctagaaaatgggctaatgaaatggaagttgcaaaagacgataatcaaatatctaatcaagaccctatttttgctgagtattttaaagactggtacgaaacctataaaattccaggtaaatcaaataatactcaaaatagatataagcacatttatgtactactacaacagaattttggtaaaaccaaaatttcaaaaatcactcgacgttcttaccagaattttatgaattcatatggaaaaaagcatgttaaagatacagtctataagactaatggaacaatacggacttgtgtaaaagacgcaatgagtgaaggattagttaaaattaattttactgagcgaataaatcttacatggaatgaagaacgttcaagaaagattgaatatttaagctttaaagaagtccaaaaacttaaaaaatcacttttgaaagatattactccctcctacataagccgctacatgttactaacaataatttatacaggaatgcgtccaggtgaaattatggtgctaacatggcatgacattgactttaagaatcacactattaatatctctaaatcgtgggactatgataataataaaataatcaactatgattcagatgaaataaataaaaaaactaaaaataggtcatctactaggatcatcaaggtagaccaaaatttattgaatattttagatcaactaaaggttaatcatcatgaacgactattcattggaaaggatggaactataccttcatcaaatgctgtaaacaaagttcttagaaaacaactggcaaacaataagattaaaaaagatggttttcattttcacagtttaagacatactcatgtagcaatgttattatttaggggagttgacttatattcaataagtaaacgactaggtcactcaaatatgagtattacagctaacacctacgcttacatgctagacgaattaaaacaacaatctgatcaacaaatagtaaatattttagatcaaatttaattaaatagataccttttggatacccttgcaaaacaaaaaccgctctagaacaacatctagaacggttatctatggagatgaggggaattgaacccctgtccaaacgcatctcgtcactgacctctacgatcatagttatattacttgaacttcactagctcaaaacgccatataacagggctagaatgggctagctaacctgttaagactctttttaactattcaggtgaggtagttaaacgtaactcgctaaagttgatactcggtgtcagccacgagtaaaccgacaaggagcaacacatgcgcttaaattaagcagctaatgcgtaagaatttttgttatttgcagttatatttaactgtaacgtttttacgtagtcgtaacctacgaaccgcagtcaatgcgggtctacgcctgtcgaatcccaaaacatccccttgagatacttattcattatagcatagacacacattacatgcgataaaaatgcttaatcaatattagtcaaacgtaccacatcacgttcaatcatcaattcttcattagttgggataaccattcctgcaactttggaatctgtttttgtgattagtccttcactaacactttcattagcttcattatctacaacaacacccatatatgcgaaagcgtcaagaaccgcttttctcacaccagtatcatgttcaccaataccagcagtaaagataattgcatcaacgccgcccatttcggcaatataagcaccaacgtagcgaataatacgattaatgaaaatttttcttgctaacttagcccgttcgctatcactttcacgcacatcgcgcatatctggtgaaattcctgacaagcccaacaaaccagacttattattcatgatataaatcatttcatccatcgacttatgctctaccttcattagatgttgcacgagtgaaggatcgatatcaccggttctagtagccattgtaattccggcaattggactaaagcccattgaggtatcgtaagacttgccatccttaactgcagtaattgatgcgcctgatcccaagtgacagatgactaactttaagtcttttaaatctttacctagtaatttagcagcacgcggtgctgtatagcgaattgaagtaccatgagcaccatatttacgtacaccatatttttcataatattcataaggaagtgaatacaaataatgtactggatcaagattacggtgataagtagtatcaaaaaccgcaacttctggcacatttggtaaaacattcataaaagcttcaattccgcgagcctcagcaggattgtgaagcggagcataatctgacaattcgtagatcttaggcagattttccttagtaataatagtagaatccttaaagtactctccaccattaacaacacgatgtcctacaccgacaatttcagttagttcttcaacaacatggtatccttttaaaaacttgatcaataagctaactgcagcttcttgatctgggatttcagttttttcaacgtgcttagtaccatcagctaacttaatctcaaatgatgaatcttcaagacctacacgatcagccattcctttggcaagaaccttttcatctggtaatgagaataatttgtacttaaaagatgaactaccagagttaattgccaaaacttttttcataaaaattaattcctcttctttcaaaaaaataagtgctttatcaattaatgattaatctttgcataccactcgttaagtttaacattaaattgaattaaagtctcttcttttttcaaggaaccaagtttggtaagcaaaacttcacttgctttggcctcatcaccgtgattttggaaaactaaaactgactttggattaaacttgttcttaaacatatcatctggcaactctacaatcgccttcaaatagactttcttagttaaccatggcataaaatcagcgccaatcttgcctgacaaaatagacttaggaactaccaaaaaggcatagccgttaggctttaaattattaataatttgttcgattaacaacaaatgagcaaaagaatgacctttcttagcctgattttcaaaattcttggcattctcatcaactggataatagcctacaggtaaatcacttacaattgcatcagcgttaggacacatccaaggcattaaagcgtcttgatgatataactcaatgtcaatattattcagatgcgcagccacatctgtcaaacttaacatatcttcatcgttatcaatccctaccaattgataattatccttagaatgattgagtgccttaagttgagaaataattgaaaacaacaaattccctgtacccacggcaggatcaacgatttccatcttttgatcttttaataatttatgcatcaacattgctactactgtagcaattgcaggtggagtaggcatttggttaacatcaaagccatcatcattaactgcctttaaagttagaaaagtaaagacttgagccttttctttttggctaatttcgtcataatctattgcttgatacttttgacttaattcagccactgttttttcatccggtgcaccattttcaaccttaatcttgccactttctaagttatcaaaagtctctactaaggcttctgtaaatgaaacatttaatgccgtttgcaaagtttgcacacagtctaaaaactgattaaaaagtttttccaaattttccatagcggtccctccataccttaattattttatagaaagggataaagaggtgcaaggaaagtcaatcatccgttaagcattcgataattaggcgattgttctccatgctagcatgataaatatcttgatacattttgataaacaaaagcgtggtcattaaaactaatacactacttagtaaggcactgccttttacgttatgcgtctttttctttggttttagcatttttcttttcctgttcctcatcaagctgaaaaactaaatctgatgcacccttatttttctctgttaccctaataatgatgctatctttagtggttttaaaagcagccttttcaacgttaaataataacggcatatagcctttccctgcaccagatactttaagtacgttctttttatagtattcaattcggtaagtagttgcatcgcctttttgatcgatgcacttaaaggaagcactattacttatagctaatttagttactggatacactgccttaattttgtcagcccgcataaaattttctagctgtacataagcataggctacttcattgacatgctgattttgattcaagtttgcttttttaacactcaacaataaattttgtaaaattagcagcaccatcatagtaataaaaagcgaaaacattgcttcagctaacataaaacctttactctttgaccgcaaaagtttgtttagtcgttgcatcccaaacatgattacgtcctgccttttgataaattcgatcgtgaactgttacttgctccaggtcagttttagtcagtatatggtaagcataagcacgatctgtttttaattccatctcacgaccatttttctgattttcagctacagttatataaaagcaactaacagcaatcacagcaattataattgctataaagctctcaattactagaaatcctttaacttttatcattccgctactctcccccacagcatttgatatttcaggcttttttccattccgtagccactaaaagtcaccgtacctggtttagaataaccagtcaggttgaatttaaaatgatccaagccagtaattttgatattttgatcaactggaatacttttgtgatattttccgccagagaataaaatttgattggatttagctagatatgatacgcaaatagtaacctccttgatcgtactgtacctcgaagtttgatcaagtgccgtcgtaactcttttaacagtattatcaaaaatcagtttttcttgatatctttttaactgcaaactaccaatcaacaaaatgccacagcaaacaccaagtgtaattattacttctagtagggaaaagccggctaatttatttcttttcaacgacttcgccactatctaacgtgaaattctttttagctttagtaatttgatcaccagttaagtaatcgtccttttttagatcttcaaaatctttaggttcaccatatttatccttatataactcaacttgcgtttgcacagtagtcctaaatgcatccgcagttttagtttcagcattcttcttttgattaatcaaattaggcacaattagcaaaatcaaaatcacgataatggcaattaccacaaccatttcaatcaaagtaaaaccctcttgcttgcggcgcttagccataatgtttgctaaatacttcttcatcttctctttcatttttaacttaatcctcttcttcactctatttttttacttttatctttaatgtcactttttctatagtccttgcatcattgaatacattggtaataacagcttcaaatacattccaataatgcataagccaattaaaataaaacaagctggttgaacattgacgactaatttctcaattttttcagttaaatccaaaaataggctacgtcctaataacaaacagcgcttactcaagctctttcgctcagagccagtctgcaataaaactaataaactattaggcaaaaaatcctctgcattaataatttcttctaaattttttccttcagctaaatcgtgccctatcttttgtcccagtgcttgctgcaatgaacctttctcttgatctgccgcatattcgcacattcgctgcaatgaaaagccactagctagcagcagtccaatgtcataaaccaacaaataatgaatatacagcataactacctgcccaattaacggatatttactcagttttttcattgatgaataatcctgtttattgagcaaagtaacgatcttagcaaaaaaatataagcccagcaatacaataatgatcagaccaatcatgaccatatctcctgaatgatcactgctatcgctgaattgtgtcgaaataaacgattgcataaagaccagtaaaatcaccatcattatcgctaaaaccaacggataagataattcagcccgcagttttttcatctgctcctgttttagtcgattcaacgttgctaaatgctgcaaacattcaactaggtttccttgctgtaaagccaaattaacctgagttactgtcgttttagaaaagcctagtttaagcagttcagtactaaaacttgctccttctttcatgcgactagccattctttccatcaactgacacctttttggccacaatgccggcattaattcaattgaattgagcaaagaaaaaccattatctaaactatgttttaaataatccaaaaaggccaattgttcttcgccatttaacttatcctttttggaattgccaatatacttcatgattaatttctcctcctttccacaaacgctctagattttcctgccaattaacgaattcaccacgaaccgatttgcctagctctttttttagcaaagaatctgctgcaatatccatcaagcactttaattttccttgactgactaataatcgctgatacgacactgcagttagacaatttgtcagttcgtcacacctaatacctaatccctctagtcgagaaatagtttgcaaagtacttttagcatgaactgtcgcaaaaaccaggtgtccacttaaagctgcatcaactgctaaacgtgctgttccttgatcacgaatttctccaataattaaaatatctggacgatgccgtaatgccgcctttaacaggttttggtaatcaattcccgcttcgttattgacttgtgcttgcaaaaaagaagactcatgaatttcaacaggatcctcgattgtcatcactactttgttttggctcattttcttagcaatttcatacattgtcgttgtcttgcccgagccagttggaccactagtaataatcaatccgcgactcttagccagcttttcaattgttcccagctgctctggaataaaatattgactatggtcaatcccatagatgactcgaataaccagtgactcttgatcggaaaaatctcctaagctagataaacgcaagaaatattcatgtccttcattctcatatgtcattgcgccaacctgcgggcgacgatgttctgcaatatccatctgagcactgtacttaaaaaaattgataatttcctttcccgtctccaaagtaaaacctgcatattcaattagacccttaccggtccgaaatttaaccatcaagttttcttttttcgggaaaaagaaaatatcacttgctttaactttaattgcctcaatcaataattcactgacaatttctttgatcttcataaaaatcctccttttttgcctcacattatttattacgcaaaaaaaatcgatttttttgtgagaaatttaaaaaaacacaaaaaattttctcaactctaaaaaacgttgatctaacagcatttcaagattaaaaaaccattaaaaaagtacacaaaaaaaatagcttagccattggctaagctatttcatcattaactaattaatcttcatcagccgctgcagtataaacattttgaacatcgtcactatcttcaagagcatcaactaaatgttcaaattgttccttcttatctgctggaactggagtggtgttttgtggaatcatagttaattcagcatctgctagtttgtaaccatccttaattaaggcgtcacgtacacctgcaaattgctttggatcagtgtagatttcgtatgcatcatcactagtttgaagatcgtcaccaccagcatccataacatcaagtaatacttgatcttcatcagcatcagtagttgaacgatcaattacaatgtagcctttacggtcaaacatgtaagcaactgaaccagtagcaccaagtgaaccaccgttacgagtgaaagcaacacgaacgtccgaagctgtacggttcttgttatcagtcaaagcttcaacaaagactgcaacaccacctggagcataaccttcgtaagtaatttcgtcgtagtgttcttctgaaccaccttcggccttcttgatggcacgcttgatgttatccttaggcatgttgtttgaacgtgccttatcaattaccatacgtaatgtaggattcccatcaggatcaggaccaccactctttgcagccatataaatttcacgagataacttttggaaaattttacctctctttgcgtcttgcgcattcttgcggccttgaatattgtgccattttgaatgtcctgacataaggatccttctttcttttttctaatattaattaacgatattatcttaactcacagcacctcaaaattcaatggtgtcaaccatttaaacttgttttttctggtcaaaaaatctgtgtttaataaacaatactagcattatcagcaaaattgccgttaatgctcctgctccatcaagcattacatcatgcacgctcggtgttctatcacctgttaaaaattgatgatattcatcaaatacagcaaatgcaattgccataaaccaagttaaaactggtgctacccatttgattttgaaaattcttcttaatcctaaatagccaaaaccacctagtaaaaaataagaaccaaagtgagccattttacgtaaaacaaattgggccagccctgctcgaccatcaacttgcacattgtgaatacgaccaccgtaagtaaaatcccagccagcaacgatattctctaaccagccaaaataacggttaattttattgtcatgaatttcctgctgttgataagtcattgaactagaaatgaacaatgcaactagcaccaataaagcaagcagtaaaaagattttttctcgtttagtaaaatgaaatttatccattgctatttcttctctcttttttacttcttactttaacaaaaaacgggttaaacttgacccgttttataaattatttaactttgcttaatgcttcatcaattggtgtgtccccatcatgcataataattacttgatgaatcgtattatcatactttaggctatcaaccaatacctgagcaacatcatcaatcgaattttctccaccttctggagtaaatgatgtcttacccgttgctggcttctccattaagttacctggttgaatgatcgtataatccaaattagtattatgaattaaccattcatcagaaaagtacttagcaatatcataatcaataatgcttgcaagagaaggaatttctgcccacttgtcttggtcaagcgcaaaggcggagcttagttgaacgtaacgcttaacgccattagcttcagcagccttcatcagcttaactgcgccatttaagtcagtttgcaataagtcctttccacgagaacctgctacaaaaatcactgcatctgggtgacctaattcttcggtcagcttattaagcgaatcatgaaaatccaaatgttgcacccgcatattaggagaaataatttcaacagtattttctcttcttgcacctgcaattacttcatagccttcatctatcaatcttttgattacttctttgctcactctgcctgtagcaccagctacaaaaactttcattgtttttcctttctaccagctagccttcttaacacctggaagttgacccttatgagctaattcacgcatacattctcggcataagccaaacttccgataaactgaatgcggtcggccgcaacgttcacagcgcgtgtattgtctagttgaaaattttgtttcttttttgttacgaataatttgtgatgtttttgccataaatacctcttatctgcgtctatttattctttgaggcgctggctttcttttgctagttaatagtcccaacgccaaaataataattccaattgccaatacttgtccagtcattaacatccccacctttctttttgactcttactttttgttggtgtattatacatgcttacctataataagtaaagagatttgattgtaaatagaaagcgttttacactagtctgatacattccctgtcaagtagacagtagaattacataaagcttttattcctcagttgattaataatcagctgaggattttttggcttctcttattttcttttcgtgtattttttgccagtatttctcaattcgatgatttggtgcaatagggcaattcttaatattgcctttcatcgcttctttgcgcatttcaccagcagttaaaccgttaaaacgtttctgtggatcttcattaatgtagtaatctattgtcttacaaatagaatcattaagttcatcataactggccacttgaggatgaagaataactcgcatttctttgataatgccttgccagccttccattggaccattatcaatacagcagccaacacgagacattgattgcgtcatgccttggtcttctaattggttttggaaaggtgcgcgagtaaattgaaaaccacgatcactatggaaaagcggatgagcattagggtatgctttaacagcctgcttataggctgcttgaactaaagcagtatcgtttcgtttactaattgcgtagccaacaggatagcgatcatatagatcaaacacagtacatagatatgccttaggcaggttagcagcaacgacttcagtgatatctgtacaccatttttcattaggtctagatgcattaaagtctctttttaacttgttttcggccgttttctcaggcgttgtatgcttgaactttagcttctggtatctaggcttttgtgatctaatgccattgatacacatcaagcggtaaacagttttatgataaaccggcttttcatcagacatctgtcgattaactgccatggtcatcttttccgtcccaaacagactgttgttagacttagttatttcaatgatctttgcttcaatctttttgtctcgttcttcacgcttactcggcttgcgcttaggatcaaagtatttgtaataagctgagcgtgctattttagcccatttgcacattaaatcaatcttccaattgtacttttgatggcagtcatggattaactgatatgtttcttgtttccagcgtctttttattgcggcttgtctgtatcttggttgtccggcaagcacatcctttctaactgatctaatttttttaggaattcgttcttagtttgttcttctttgagctgacgctctaattccttaatttttcgattagccagttctaactcagttagctcttctggcttcttatgtctgcctcgtttatctgttaatcctgtttcaccattagctagatatttgtgtgtccagctgtaaacctgctggtaagaacaatcaaatttgacagctgtttgagtgtaattcttgtcgtgattaagacagtattgaacaatctgaattctttcttgctgggtagtttttcttcttgctttagtcatatagacctccggatggggatcatagtcccgattttctatatgactattatacttggaaacccattctgatactgttccattgcttctaatgccatatttattagctaaagaaggtaacgacattttgccagctaaatattcttgaacaaccttttctttaaatgccttagagtaatgattattgtattgagcattacttagaagggtatcacgattgctttgatattgatgaacccatcttcttacttgcatcgctccacttttacttggcatcttaagccgtttagctatttcaacgctgctcctattaccattcaagtattgttcaactgcccatatcttttgatcgaatgaatatttactttttctggacataaaaaatcccacctccatggataattgaatactttatgtatttaaatcgtccactttagtgggattgtatcagtcacagttctttttaataggtaaaatttatttgaatactttcatctaagaaaggaatagaatgaacgaaaaatgtaaaaataagtcgccaggattcttatctttttagggagtaattatttttaaatagagaaggatgagaattaattggacgatttaacatcaacaaataaaatgaaagccatcacttggcctgttttgaccttgatggcactttgtactgttatcggcttggacgatatcatgtacaacttccaaaaccaagggatgccagttatcacctcttggattatcatgtgtttgctttatgtaacaccttactcattaatggtaggacaattaggttctacgtttagtgaagaaggtggcggactttcatcatgggtccgcggtactgacggagaatttttaggttacttcactgcttggacatactgggcagcctcaattccttatgctgtagactccgctaacgaaatcattgtcgacctaggttgggcattgaccggttcaaagggattccaagataaaattcctactaccatgtttgctgctttgactttcgttgtgttcattgttttcattatcgttgaacaccactttgccaactcaatggaattcctttccagtattggtggtggtttgatggtcattatgactgtcttgtttgttttccttgcctttgttggtttggcaaaatcaggcggtcacatggctacccaaccatttacttggcacacaatcattcctaaattcgacttgcactactggtcaaccgtcggaatgttaatctatgccatgaatgggtgtgaactggttgcaccatatgtaactaagatgaagaaacctaagtcagacttccctaaggcaatgattactttagctatcatgactgctttcttaactatccttggttcatttgcacttggtatctactttgacgcataccacattccaaacgacttgaagatgaacggtgcttactacgtattcgacatggttggtaaacaattcggtatgggtaaattcttgctttacctctgggcttggacatcattattgttcaactgtgccttggttgccgtattgcttgatgccatgactagaatgcttatctccgacactggcgataagtacatgcctaagttcttacgtaagaaggacaaaaacggcttaccaattaacggttacatcttaactgttgccctttcatcattcatcatgatcttaggtatcttcttacctgacatgaacgatatcttcaactggttgcttaacttgaactcaatcatttcaccaggtgttacctgctggatcttctactcattcatgagagtaagaaagaactcaaagaagtacccatcaaaatatgtctacattaaaaacgataaacttgcttggcttgttggtcttgccttgttagttgttactgccgtagcaaccatccttggttttgcaccacaagatgttaagcaaggcagtggcctttggtggtacgaattgatcattaatattgtagccgtaattgtcttaattggtttgggtgcaattttacctggaattagacgtcgtgaagaagaatacggtattgcttttgacaaatctcaatggatttggatgggaattatcattatcggttctattattcttgacgtatggcttggtagtaccaagattccagcaagaatcacaatgattatagttgaagctatcgctgcattaatcattacttggattgttggacgaagaaaaccccaacaagcaaccatataaaaactaaattacaaaaaagctcgcaaataatgtcattaattatggcatgctttacgagcttcttttttgctcaaattgatatcactttcactctatattctataatcatatagtaatttacaattattttgtaattttatatactcaacaaggttagcactaagtgttatactaaagtataatggagataaggtatatatttatagaattatttaaactgagactgaataaaatgaaaaatataagaaagaagattatagtatttctgctagccttggaatgcttagctttttgtatatcctttaatagcaaagtgtatgcatcatggagtcccgcttcagaatggaaagaaaatggctatcctactgaggactggacaacagatcaatttacataccatcaaataggatttattaatgatcctaaaaataatcaattgttgttatatgtagacatttgccctgattctaaaaccaatagaaatagtcatggatatgaaggtggatatcgtcaattgcagccatcagcctacaatataaatgttggtaatgctacatacagtgttaatttagatgtcaatccatggaatattcaaaatggaaaatctggatatgcaggaattggagtatgggatcctcaaactaatcaatataaagcaactaaagataatctctgtcattattatgcagatagtgatggccgccaatcggccataattaagattccttacaatatgtttaacagagatgacctaaacggatcaactaaaatgacaatgcaaaatcctaatttgggtggcaacacaaaaatcacaatcagcggagccagcaccggcccatacatccctgccatcatcgcttttgtcttagcttcaatagccgcaattagttattaccataaaagaaagttagtacgtcatgaacatcagtaaaatatccccaaaaatatttcattttggaaatggtgtcatccgtgcctttttctttggcttgattataattagcttcttcgctgtgctctcatctactaattggctgccagatgcaaaaactacgaccggcttaacttacataatgtttgcactactattaattttagttttaagctggttctcctttccaaagtttcaaatgttcttaaaaacaatttttatcaagcataaatggattacttctattatttgtttagtccttgcattaatttggcaaattcaatttgtctacttcgtacatcccgcaatcggatttgatgttagtgctgttcacaataccataatcaatccgaatctacctgaattaagaggatatttcagtgttaactacaacaacctatccatcctccttactctaagacaagttgccaatatctttcattcaaccagttggttaacaatggctttatgttcaacacttgttacagatttaagtgttttagtaatcatcgctacaattgcgataatcaattttcaaaaaattcccaatatcatttatattctagctagtctgcttagcatattccctatttgcatggttccttacacagatgtatggtgcttgctccctatttcactttcaatttttggctggagcatcgctacccaaaaatcatatctagttgtcattcgttttttaggagcaattttatccggaattagcttagcatgtggcgtttggatcaagccttcagttgctgtttggggtattgccgcgattttaacgagtttactctatattttaaaaaacaacaaagtaattctaacttctattttctgtttaactattgcagcaagttttgttttagcctatcaacctcttaaaaaagcggttcaagatcagcattacatcatcgttaatcaaaaacgccaaattccgatgatccacttcatcaacgttggtttaacacatgatggtgcctatgatccaaaagcagctttaaaaatggatgagcttcctactaagaaacaaaaagttgtctattctaaaaagatgatcatcaagcgtcttaaaaaacgcggtccattgggttatttacaatttctagttaaaaagcaaggtctaaatactgcagatggtacattcggctggctgcatgaaggccattttattatttccaagcagccatcagaaggctggcgaggattcttagcggaatttatctatccaaatggaaaatatgttattgagtttagatttatcgctcaaattctttggacaattattatttttgtattgctattcagttttcaaaaaggcggctttattattcaaacgctaagaatggcactagttggcggttttatattcttacttctttttgaaggcggacgtagtcgttatctagttcaattcttacctattatcttgattttaacagcactttcagcagacactgctaaatataatttagataaaattttgacagcaattctaccgaaaagaggtttttaaatatgaatcttagtttaatttaccctactatctctttaccaatcattacaattagcatggttgtaactcaaacacaaatagaaaaagtatgggagaaacagctagaagactggcgtcaccatttatttatcatattgtgttttactactttttacatactccaaactgtttgtatgagactgtaaaatattttgtgtaaggatgaataattccttaaatttatttctttaaacattagaaaaaggagttcctttctcgtatgattggtttgaacaaaaaaacacatacagaaagaagaactccttcatgaatgattttacaaaaaatatagcacaagctctattcaatcaagacaaaataaacgatttattgcgcaaagagctacaacaggctgttaataacttgctagaagctgaattgactgcctttctgggctatgatccctatgccagaaatggctggaatactggcaattctagaaatggtgcttatttccgcaaggttgatacccagtttggaccaattgaagtgcaagtgcctcgagatcgcaacggccagtttcatcagcacacgctgcctgactacaagcagcactcggatatcttggaaagcatgattatcaagctctactccaaaggcgtaactaccagagaaatcgctgacttgattgagaaaatgtatggcagtcattatagtccagctcaagtatcaaatatttccaagcagatgctccccaaggttgaggcttatcacaagcgcaagctaagcgacaagtttttctgtgtctatttggatgcgacataccttcctttgcgccgagaaacgtttgagcgtgaagcagtctatattgccattggcattaaacctaatggacataaggaagtcattgactactgcattgctcctagtgagaacattgaagtctggacagagatgcttcaaaacatgaagtccagaggcttgaagcaagttgaactctttctttctgatggtgttgttggcatgaaaacagccttggccaggacttatcctaaagctcattttcaacgctgcctggttcatgtcatgcgcaatatctgtgctaaagtccgggtggatgaccgcgaaaagatcatgaacgaattcaagcagatacatcaacagacaagccaaaaagaagctgcagctgtcttgcacaaattctatgccagatggaataaagcttatagccatgttatcaaaggtttgaaggaaattgagcccgatctgctggtcttctacaattatcccaaacaaatcagagcttcaatttattcaaccaacatgattgaatcctttaacaacgtcatcaagcgtaaagctaagcctaaggcagaatttccaactgaacagtcgcttgatgtatttattggcatccaggcaatgagctacaatgaccgctatttcgaccgaattcataaaggctttggtcaggttcaggataccttagaatcctattttgattaaataaatgattaaaaaatcaatttacgagaaagaactatttacacaaaagatttgacagtttcgtttgtattgcaaatgtaaccatctttacctttaaagcaattgcttatatgtatgtcattccaacaattatggtattacgcaacaagcaacatatttggtggtttttgctttttatcacaccactaattccgttacttattggtcttgatttaaagagatattcatttataaatatccccgctactttattgcagatttcatccatcgcattaatctgctttattctaaatcattgtcaaaatctttcatatcaagttaagtatatcattgccctttattcagggagtctcatccattttgtacgtctttatatagaaaatgaattacacctcacatttttaatcgctttgacaatcggaactactttcaccatcattggtgaaagctggcgttattattttgaaagtcgacatgaagaagcaattgctaaattgcattacgaaagcaagcgtgatgaattaactggtcttcttaactttcgcgcttttgaccaagaaatgaaaaatttatctaaaagacctaatataactaatacctatattggcgctattgatatcgatcattttaaagtaatcaatgatacctatggtcacttaaatggtaatattgttctgcatactttttctaaaaaactgaaacacgagattgataaagcttttgctcctaattgtttcgtttaccgctttggcggtgacgaattttcaattgtcatttttaatgctaatcctgaacaaatcatcgctgcactaaacaatgttgaacaatatttccgcgataattttatcaaacttcctgataataaaactaaaataaagttctcgttttcatgtggcttcacgaagcatttatctaatgaacatttttataacactcttgaacgcgcagatgatttagtttacaaagtaaaaaataatggccgcggaaaaatattgactgattaaaaaactaaggaaatgaataatgcttaatggatatttaattggcgggattatagtttggttatatgccctttcagtaactaatcgtgcacatttatttgctttttattattgggttggtgctattggtgcttttcttttaactacttttgcatgccacaaatattttgtctggttcctagctagcctagtgagccgcggagctggtgtgattggacagctgactcatagctttactgcttatccgtttccagctgctttagacattcaaactacttttggatcaattaccctattagttgactatgaatgttctggaattattgaaacattggcatatttaagcttattaattttctttcctatttacactcgtcgtcaaaaggttgctcttagcattatcggtgttttttggatctactttattaatatttgccgattaggtttaattgggataaccgttcattaccttaatttgcgaaccctgttctgggttcacgacgttataggacgtatctttttctatatctttacaattcttctatattatcaagtcttcactcattcacaattagtctcaaacttactagggcgaagcaaattagattaaaaaggaataatcatgtttgatcaaacagtattacaaatgggattctgggctacttggcttttaattcctgtcatatttgaagaaattccgatgataattaattttattcggcttcttcatcatcataaaattcgcaaaaaaacccctctgccagattttttgccagtattatcaattattattccgacttataattcatccaaaacactttatagatgccttaaatcgctagctgattcagattatcccaaaaatttactaggaattttcgttgtcgataatggcagcaaagatgacacctttcaagtctttgctaaagctcaaacggactatccacaattattgatgcggtggcttacttctcctcatggaaagtcttctgcattaaatgctgccatttataaagcaagatcccaatatatcattaatatcgatagtgacggtcggttggataaacatgctttaaacaacattgttaaaaaattctcggctaatccaaatatcgatgctttaactggaacaattttaaatgaatattttgaatattgccaaacctttctagcaggaagaaatattgaaaataacagcaatcatattttcacgctttctggtgccttttcggcttttaaacgcgagaccttaattagaacgtatctttacagtaccgatacaattagtgaagatactgacatgactttccaaatccggtacaatttaaagggaacgatttcattttgtgatgatgcaattttttattctgaaccaattagcggcttcagtgaactatatactcagcgacaacgctggcaacgcggtgaactagaagtcattaacaaatatttatcgcaagttttatcttggaaacaattcttcagtaattttcaaattcgtcgtttaatcattgatcacacagtcactttcctaaaaataatttggatgtttgctatttttatattattaggatttggctattcatggatatcattattgttttcttatgcggtaatttatcttttatatttatttttggagatttcgagttcaatttgtgtttacatatacttaggaagctttccagaagaaagaaaattttatcttaaaaatatttggatgatttttttactgcttttttataatttactttgttctttcattcgttgtgttgggattattaatgcttcaaccaccactacaacttggcaaggaattaatataattcaagaaggtcaacaggttaaccaaatcataaaaaaagatataagacaattattgaaaagaaaaaattatgacgactaaatatcatacttatatattcacaacttatttgaacgcatcacatgctattcgttggagtaaaggaatcgggcaggctcattcccatacttatgaaataaggtatagctttcatattaataacggcaaattgattcgtttcaatgaaattgaaaataagattgctgaaattataaaaaagtttaataatcaatttttaaatgaagttgagccattcaccaaagtaaatcctactttagaaaatttaaccgattatctattcaatcgtttcggcgaagaattaaataaattgaattgtagtttagatgaaatatctgtaagtgaatcaccaatgagaacttatcagatttcaattaggtaacagaggtaatagtaatgagtaagtggtataacgtttttcaacctatttatcaagtcgataaagatttaaatgtaacaatttcacattatgaaatgttattacgagatgaaaatgattccttcccaaataacgatttcttcagagtaattggaactgaagaagaaaatcaaaaatggattttagccgaaaaagagtcaatagatcaagcttttgctaagtaccctgatatctgtatcaatttaaacattgagcctattcaattcgcatacccaagcgtttggaaatttattgaaaatatttatagtaagtacgcgtggtgctagttaaatctttctagacaataagccaaattataagctaaaattgcaatttccaaccggctttgaaagcctatcagactacgtgctcgattgttctcggcattgtaataggtcagaagcgaaaagtcgctttcaattgttctgcgaatagccatcaattgatgatcattgtgctttttagctcctgtcatatttttacgatatggtgtccaaagttcataacccatttgttttagctgttgatgcagttctttgcctaaatagccttcgtcgccaagaagatagtaattagatggatgggcattttccagcagttcaactgtctccttggcatcatgaactgatgcttttgttacgacataatcaagaatgtaaccgtcatcgctaacaatggcatgaactttgaaaccatagaagtaaattttcttggtggccttataaccaatgttggcataaccgcgaaaaattttagcacgatagttgcgaattggttggcaaacaggtaccggaaagctgtcaatgatcaagaaatgtccattcaggtcaacctttttattcatttcttgccgtatctgataaatcaattgcaatagctgacgtgaacgccgattaaaacgtgagtgtgataaacaattgaaacattcacagaatcttctttgtgattcaattcctgtcttagcttgccagataagtaaagccaaaatcagactgtccgtagttttaatttgatcaatatttcgccgatgagtaaactcagccggtgcatacaaacgataccagtgccgacaaattatcactaaatctttaaaactaacttgtaaatggtggctaaaacgcttaagcttaagacagttcaatcagatcagactcttttctattattactatttacaagtcgagtctaacaagattggacttttttattaactaaaacgatttaactagcaccatgcgtatagtaagtatggtaaaaaagtggtcattgaagtaactgaacgtcaacttcaagctggaaccttaggtaataaacaatttgataaatctttccaaagattccatgatattggcttggacgttgttttagacgatgttgattctggtggtcatagctttacttttgtagatcaccattctgatataatcagtgggatcaaattatcattactagacttcgatcctattagttctgatactactattaaatttattgatgcttgggctagctttgctaaggaaaaacacttagatctagttgtagaagctatcagaaataaggaaattgctcaaaaatttgctggtaataaacatattttccagcaaggttattactggcaacagggagtaaaactagaagacttaccaacggtttatggatttaagaagtaattacaaaaagacagaattgattgcttaattctgtctttttttacatgtatttatttaaaaatttgtttattcgcattttatattcatgcggataagtttcgaatgaacgcgcatgagctgcacttttggcaatccataactccttaggaccatttgtagcatgatagttttgatacaccattttagttggcacaaaattatcttttccaccatggataaatagcattggcttagtattcttttttaattgcttaactgcagatgcatcccctaaataaaagccaagatttgctttacttacaccgcttaatagcgtaactgcacttgtagctactgcttgcggcataccgtataaatcttttgcttcatgcatgaattcagctttcacatcactatacccacagtcttcaatatatgccttaacttgcttaggcatcttgaggccactagtcatcattgttgttgctccgcccatactgacgccaaaaattacaatctgttgttttcttccttcaattgataaatctttattgacccattttctaacgtcatatttttcaggccaaccatagccaatatacttcccttgactttgtccatgagcacgcgcatcaggaatcaaaacattatatcccaattgatgaaacatcgccgcatagggtgccatggtatttttattattaccaaatccatgcagcaacacagcagtcttttcagaatgcttatttggaatataatttgcatctaagcggtagtttgaagaagcagacttaatataccaatgctcttttttagcgtttttataccactttttattctgcgcaagtgaatctttctttttcttgctagaatatttattcagcactgtcttttcacctggaacaaaagcaacattaaagaaatatgcttcaactgctccaattaaaacgattaaaactgtggcgactatccctattatccaccatacttttttgcgttttctattcaaaatgtcaactcctatataaaataatatagaattaattatacacttttgaattttatatggtatattgacattttaagtaaaatattgcctatacaaaaaatgatggcttacgccatcattttttgttattaatctaaatcttcaccgtgagattcaattaccttcttgtaccagtaaaatgaatccttaggcattctcttaagagtacctttaccttcatcatcacgatcaacatagataaaaccgtaacgcttagacatttgaccggtaccagctgatacttcatcaatacagccccaagtagtgtaggcacggacatcaacgccatcttcgatcgcacgattcattgccttaatgtgcattctaaggtaatcaatgcggtaatcgtcatgaatcttaccatcatcactaatcttatcaacggcacctagaccattttcaactaccatcattgggatttcgtaacggtcatacataacttcaaggtagtattgcaagccatctggatcagttgcccaaccccattctgaatacttaaggtatggattcttagcaccagcggcgaagttaccgccaaccttatcttttacttcatgagttgtgataacgttgctcatgtagtaagaaaaggtgtacatatcaactttaccttccaacatatccttcttatcttgctcagtaatgtctaagtgaacattgtgttctttccaaagacgcttagcaaatgttggatacttacccttgcattgtgcatccccacagtagaaaatattttgttcccacatatggcggttagtcaaaatatcctttggatctggggttaatgggtaatcaacgattccacaaatcatattccctaccacataatcaggatcaatttcatgagccaacttaactgcccgagcactagctacgaattgatagtgcaatttctgatatgcatgttggtatgccttatcatcagtcacattattgccaaaagcactaagcatcaacagggttgaattgatttcgttaaaagtaagccagtacttaactaatcccttgtattcttcaaacaaagtcttagcatatttcacatacatatcgatcattttacgatcttgccagtcatgatatttttcactgaggtaaagtggatcttcatagtgagaaatagtaactaaaggttcaatatcatattttttacattcttcaaatactctgcgataaaagtcaagtccagcttgatttggcttttcctcatcacccttagggaagatccgagtccaagcaattgataaacggaaggttttgaaacccatgtccgcaaacatcttaatatcatctttgtaatggtgataaaaatcaatcgctacatggttaggataatattcattaggatcaattgcaccaactgccccttcaggaagtcccgcacctggaactcctggtgttttttctaacttaccatttaacttgtaagtcaacattctaggtgcatctaagctacctgcagtagtaatatctgttactgataggcctttaccatcttcatcatatgcaccttcgatttggttagcggcagttgctccgccccataaaaagttctttggaaatgacattatgattctccttttctgaaagcatttacattaattatagactaattggtttgaacttgaccagttgttttaacttctgcgttactgccttgcaaagacaaaatttcttgaccaactttaacttcaccttgagctacttgctgtacagattcatatttcttagaattcgtaacaacaactggagtagtcacttcatagccagcagccttaatttctttaatattaaatttaaccaatggatcacctgctttaacctcttgacctttttctactaaagtcttgaagcccttaccttgcagattaacggtatccattccaatgtgcattaacacttctgcgccatctgtagtgttaagtccgacagcgtgtcctgttgggaaaactaaagcaatcttaccatcagctggggcatgaagcacaccttcgcttggttcaatagcaacgccttcccccattgcaccgcttgagaatacttcatctttaatttctgacaatggttttacttcaccgtctaatggtgaaactaatttggttgaaggattttccttttcttcacttaaaattgcttgtacaggagcactcttagtaatattagctgcttcattagcggcgtcagcaactttttgtgcttgttttttattatattcagcatcaactgattttttaccaaagagcatttgaagtgcaaaaccagctataaatgctacaataccggcaataattacgccgacaattgttgtcattgatcctcccttaggattaatgtaggccggaattgcaaagaatcccattgatggcataatgtacaatactgaatgaaaggcaccaatgattgcacctgagactgcaccagcaatacagcttaaaacaaatggcgtttttcttggtaatgtaataccataaattgctggttcagtaacaccgaacagtcctgagaaaaatgcaccagtagctgtttctttaagttttttgtccttagtttgacggataatagctaaaacaacaccaatttgcgcataacaaaccatgcaggataaacctagaattgggtcataacctaatgcggctaaatctgcagtagttacggcaacgattccccagtgaacaccgaaaataacaagtacttgccaaagagcacccattaataaaccagcaataattggactaaagttgtaaacacctgacatcactgcaccaattgcgtccccaacccaagtcattacaggaccaattactataaatgcaactggtaaagcaataatcatagtgacaactggaaccaagaacatttgcacaactgatggaatccactttttagcccagtgctcaataattgaagcaaaccaaacggtaaataatactggtaaaactgtagaagtataattcatcgtgataaccggaatgccaaagaaagtcgtgtgaatctctgaggcaaaagccgttcctttaaacaatgtacctagaacagtcttacttgcagctaattgaaccatagttggataagttaaggttgcaccaattgctaatccgataaattgattcatgtgaaatctacgtgctgcagttacccctaagaatactggtaagaagtagaaaatactatcaccaattgcatatagaatttggtaagtacccgatttagtagaaagccatcccattgcgcctactaaaactactaggcctttaataataccgccagcactaagtggagctagaatatctgtaaaaatgcctgaaatcaaagcaacggctttatccacaaagctagaattatcttcaacgtcatcatcaggaacttgtccaccgccattaaagccgccttctttgacaacagcatcgtaaacatcagcaacttcattaccaatgaccacttgatactgaccaccagctttaacaacagttacaacaccatctgtatcttttaaaacatcatcgttagcctttttttcatcctttaatttaaaacgcaaacgagttgcacagtgaacaacactggtcacattatctttgccaccaacattttgaatgatggtcttggctaattcatcatagttcttagccatttgcctttcctccttaaaataaaaacccaagctactcaaaaactaaagaacataaatgttcaacgtctttcagtaactcgggttcatgcctaatcttcttagtaacatacctaagtaacttagatatttaattatcttgacgactagttacgcgccaaatatgtaaaacaagataaaattcatcatctgaatctaaatcccatcccatttttgcatgtaagtaagtggtgatccgctccgccgtctcatacgctttgctatatttgattttcataaaacctagcattgcaggatcaagtgaagcctcctccttttgcttatttcgtaaaaatctaactaacaaaatgcgcaaatgcgaaacaaacctactatagttaaaggagctcgtatcaagttgcattgaatattgcaattgaataatatcgattatcccacgaatcaaatttgtaatctgaattgtttcttgtacttgagaaacatcactcttagcattaaccaggtgataggtcatcaaaaccgactcactctgcggcaatttaatctgcatctcctgattaattagattgaccacttttttagctgccgcaaattcttttggaaaaagattttgaacttcccaactattgttagcgggagctatatcaatatgatctttaattcgcgtaactgcaaaatcaatgtgatctgctaaagcaagatactgaaagtcattgaacttaatctgaagcagaggttcgaccagctgaagtaccttattagttacttcaattgttttagggtcaaagcccttaacttgatccacttcgtctttagtaacgaagcgacgttcaattttgctttcatcaacaggatcacttttttttagaccaaatcctacgcccttgcctaggactatttcttcttgaccttggttattttcaattaaggcagcactattattaaatgttttaagaaatttcataataattcaccaccttagcaaaaaaagaaaaagctatcacaaataatgatataccaacgcaacattatttgtaatagctaagacctgatcgtatcagtaatccgctcacttacagttattataatagccaacattgtaagcggtgtcaatataattttgtgaaaaaatgcaaaatattttacaatgaactaaaaagcgaggtaattaaaatgaaattcgttcttgcacctgattcatttaaagaaagcatgacagcaaaagaagtctgcattgcaatgaaaaatggtattcaaaaagttattcccaatgcacaaataaccgcagtaccaatggctgatggcggcgaaggtacaactgattcattggttgacgctacaggcgggcaaaaataccaaataaatgttaccggtccgcttaatcaaaaagtatcagcttattatggcatctcaggtgatggacaaactgcaatcatcgaaatggcacaagctagtggtctctcttatgttgcaaaaagtaaacgaactcccgaaacaattttaaagactacaacttatggaaccggcgaattaattaacgcagctttgaagcaccacgttaaaaagattatcatcggcctgggcggaagcagcacaaatgatggcggtgctggtatggcacaagcacttggtgttaaattttttgatcaaaatcatcatgaaatcacccaaaagctagcaggcggtgctttagatcaaattgtcaatattgatctttcttcaattaatcctcgtattaaagatacccaatttttattagccagtgacgtaaccaatcctctaactggacctaatggtgcaagtagcgtcttcggcccacaaaaaggcgcagatgatacaactgttaaaattctagatcaaaatttatctcactatgcacaagtaattgagcagactattgataaaaacgtcgcccaaatttctggtagtggtgctgctggcggcctaggcgctggcctgatcgcctttactaacgccagtattcatccaggcgtgcaattaattgcccaagaaactaagcttgaagccaagatcaaagacgctgactatgtttttaccggcgaaggcggaactgattttcaaactaagtttggtaaaacaccctttggtgttgctaaaattgctaaaaaatatcacattcctgttatttctttagcaggctatttagatcaaggtattgatcaactctatgatgaaggatttaccgctatatttggcattcttgctaaagcagaagatattgagcaagccctaaaagatggaccaataaatgttacccgtacaactgaaaatattgttcgtttaatcgcacaaaaataagatgagctcgatgcccatcttattttatttcgttaatttcttaattaagccttcacagccacgataaatttcattatacgctgtttcaaaatcatttgtataccaaggatcatcgacatcagcataagagccagcaaactctaaaattttatgttctttatgctctgggtctccaccagtaatgcgattcatatctgcgaaattttcttcatccatgcagattaaatattcataattatcatagtctgagcgagtcatttgactagcacgatgaccacgatcatatggaatatgttttgcaactaattcccgttgtgcacgagcatcaatcccatgacctaaagcatcctgcgtagttgctttagattcagcagtatattgatctgctaggttattttcttttaacaaatattgcatcacggcctctgccattggtgagcggcaaatattgccatgacaaacaaacagaatttttttcattaccttttcttcctcttagttagtctatttataaccggccaaataatcgccgtaataactccaactgttaagccaacccaaatctcctgcgacaaagttacaagaatgccactataaactcgactttgcaatgcggtcatcgcctcatttgaggcaagccacaatgccacaaatgaagcaatagtagctagtgctagtggaattgacgccgaagagcgaccaaataaaatcaaaattgcggctaacaaaaataacaaagccactgcaaaaattgaatactcataaattgtaataatatggttcacatcttctgaatcttccttcaatttatgattaatttgcttgactaaatattcattgataatttcttccaacttacttttactagttaagcctaaatctttagtggtcaattttccctgatcattatatttttcacacaatctatatagatcagcatatgataagttaacttgatatttcggcggcaattgttctaacaatgtcttttccaaaccagatgcttcgagtaactcaacccctgccttcaaattaggattatctgagtcatccactactcgattgattacttctttgcccatcgcctgtgtatcgtttatttttaaattcacattgctagtcattaataaccaaaaagatactgcggctaggccgaccattatcaaacgtagtattattttgacgatgttcttcatctaaaaatcttcccctaacatctacttttttcagatggcaaacaattgcaaggcaccatgtcaggagcatccttttctttcaatttaagttcttgctgcatcgtcttaatatcgcccttagaaagcggtgcttcttttagcaactgaattaatacctcacccttgtgcatatcacacatgttttgcatcatatgtaaagtaacttcagacatcattttgcgctgactaatagtcggcttataaacaaaacaccggccttctttacgcgtctttagcaagcccttttgcactaaacgccgcattagcgttttaattgtggaatcggaccaatcctttttaccttgtagttctttgattacttggccagtacgaacttctcctaaggtccaaataatacgcataacttcccattctgattgggtaatggaattacgatcgtctttagtttctgccataaaacatcacttctaaatccaaattttttactaaagaacaaattttttcaaagcctttgcaatcccgttgtgatcattatcatcagtaacataatcagccttatctttgatctcactaatggcgttacccatcgctactttcatgaagttgggattagaaaacatcgaaagatcattgccttgatcaccaaaaatcatcacgtctttttgggcaatttttagccgtgaagccaaatccattaaagcattaccttttgaagctcccaaggcatttaattcaataatactgtcaaaactgcgaacaatgtcataagtctgaaaagcccagtcggggaaactattccacagtttttctacctggtcagctccttcagttgaagtaaaaccgactttgttaaaagtaaaatcttttggaatttcttttcggtctctaactttcataatattatcggtcaaagccgcattaatttgcatttgcacagataaatcccgatcagttgtaatgaaatacttagtcgtctcaaaatgtacatttacatgacttaaacgctgaaaacgcaacatattattgaagtcttgataattcaattcctgactcattaaaacacgaccagaaattgtttgaattactgcaccattaaagacgattgcatattgatcatcaccttcaattcctaattgcttagcaaagttcaatactcctgataatggtcgtccagtagctaaaacaaccttaatcccattttgtactgcgacacgcaacattctttgcgtttctggcaaaatagtattattgcttgataataaagttccatctaaatcaaccgcgatcaatttaatagccattttaatccctcggatcttaaaaattacatctagcattaattatacaaaaagccgtgatttaactcacgactttttacttatcgattattcaattaggattttacttacccatttccttttcgaccactttaacgatacggtctacataggcatcagtttcttcttgagttggtccttcagccattactctaagcaagtcttgagtacctgatggacgaacaagtacacgaccatttccagccatatccttttccactgcagcaatttcatcaagaattggttggtgttctttccagctcttcttgtcagcaaccggaacattaactaggcattgtgggtaatctttaaagtctttcaaaagttcacttaatgacttaccagtcttcttcattacgagcattaaatgcaaaccggttaacataccatcaccagtattatgataatcactcataataacgtgacctgattgttcgccacctagattgtagccgtgagcacgcatttcttcagaaacgtaacggtcaccaacttgggtacgaacattcttcaagccttctttttcaagagccttagtaaaaccaagattactcattacagtagtaacaatggtatctttcttcaaacgaccatgttctgccaagtatgagccgagtacgtacatgatgtggtcaccatcaacttcattaccattttcatcaacagcaatgcaacggtcagcatccccatcaaaggctaaaccaagttgagcaccttgcttaacaacttcttcttgtaacttttcagtatgcgttgcaccaacatgatcgttaatgttcaaaccatctgggtgagttgcaatagtagtaaagtcaacgccacaatcagcaaacagtcttgagatcaatgcgcttgaagcaccgttagctccatcaataactaccttaattccacccaagtcttctggaatagtattttcaataaattgcaagtatttagctgaaccttcgtggaagtcagttacagtacctaatcccttagcagatggacgaggtaatttatcttccttagcgtcaattaatttttcaatttcgccttccatttcatctgaaagcttcaaaccatcgctaccaaagaacttaatcccattatcttctacagggttgtgtgaagctgaaatttgcacccctgcatcggcgccttgtgctcgtactaagtatgaaagacctggagtagtaattacgccaacctcaagcacttcaatcccaactgaaagaaggcctgaaatcaaggcatattcaagcatttggcctgaaatacgagtatcacgagatactaataccttagcttgttcgccgtcttttttgttcttagttaaaacataaccaccatcacgacctaatttaaaagccatttctggagttaagccttgattagctacgccacgaacaccatcagttccgaaatattttaacatttaataaacaacctttctcaaattaattattcgcattctttactttaattgatatctgtacattttcaggatcaacgcgagcaactcccttaggtaaaactaaagggtaattctttacagttgaatatgagattcctttcagatctacatcaacatccaactgcttaatctttgctaatgtttccttttgtccatacagtgttacctcatcattcttggcagtaaccgaatagactttattatttttttcatttttaggctttaaatttagcttaactttctttttgaaaagcgatattggcaaactagcttttactgtagatggattaatcactgcatttaattgacgcccttttttatcttcagctatcaaaataacttgacgctcataatcatgattaatgccattaggtaaaggcaacttggcaacgatctgatcaatctgatttacttcgcttctagcaccagtaacctcaacttgctgcggatcaacactagccgtaccaatattatatccattagcaacagcatttttattatactctatttgaacgggcatggtacgagattttcgccgttcaatatcaacattaactgttgccgggttaatcgtgtaagataattgactatttagtcccgtaacttctacctttacggtttgcttacctattttcttatgagttagatcaatataagcacggaagctttgagtattaacagtcgaagtaaccaacgcattcgaaccctccaaagttatcttaaccttttcaggataaccaacaacatagtatttatctgtattaaccgaaacttgcagaggaacactaattgtctgcgtttcattagcagtttgccgtgtcttcttagattcaccctgtgtaacaaaacctgtttgagtagagtcaatgtaaaccactaataagatcgcaaacagcaatgagattattctgattacccagcgtttatcccaaaagtctttcatcgatctgcaccccatttccagactttattaatcacacgacgaatccatggaaccttcttctcttccttaggaacaagttgagcattcaaatacttcaaatattcttcacgagacaaatctactaaaaagcgcccgtttctagtaatagttacgccaccagtttcctctgagacgacgatcgttaccgcatcggtaacttcagaaataccaacggcagctctgtgacgcgtgcctaaacgcttaggaatcatgctgttatctgacagtggtaaatatgctgctgcaacagcaattcgattattattgataattaccgcaccatcgtgcaacggcgtattagggataaaaatattaattaataattcaccagaaatatccgcatccagcttgattccagtttcaatataatcatctagccccgtatcttgttgaatcgtgattaaggcaccaattcttcttttagacatgtattgaatcgctttatcgagctcctgcaccatcttaaccgactgtgtatgagcactctcacctcggccattaaaaatcggcgtgcgtcctagccgctctagtccacgacgaatttccggctggaaaataacgataattccgattactgcccaagaaacaatttggtccacaatataagttaccgcatgcagttgcagtaagccggcaataattctaacaataaagataaagacgatcccttttgccagttgtactgctttggtaccacgaatcatcatgatcaaacggtaaactaaataccaaatgattaaaatatctaaagcaatggagaaattattccaagtaaacagattagaaatattaaaatgcattgattgctcctttcttctttaattataaccgccccaatttaccgtgcatacattttaaattctaaaaataggtcattatattcttgggtcttcttaggacctaaatctctaaagacctgtagattcttcaacgtactttgagtaggataaaactgccggtcatctctaacttttttcggcaataatttttgggctgcggtatttggggttgcatatccaacatattccgcattttgcgctgcatttttaggttcaagcataaaattaataaacttaagtgcagcttttttattttgtacagttttaggaataacaaaattatcaaaccacaaatttgatccttgcttaggcacaacataatgcaagtgaggattttgttccatcatttcataagcctcaccagaccaggtaacgccaattgctgcctcattttgcactaggtacatcttcatttcatctgaaataatcgccttaatattgggtcccagactattaagcttagtttgtgccaaatgtagtttaatactagatgtggtattcattgaatatcctaaagaaaccaatgccatccccattgcatccctagctgaatcaactagtaaaatttgcctgcgatactttttactccacaggtcattccaagtcttaattgcccctggcttgacgaatttatcattataaacaattcctagtgtcccccagaaatatggcacagaataatcattattttgatcaaatgacttatgtaaaaaactcttgccaatatatttcaaattaggaatttgcttttgatccaactgatcaagcaaatgagccttgcgcattttagttaccatatactcagaaggaatggtcaaatcatatgccgttccgccttgtttgattttggtatacatcgcttcattggaatcaaaggtctcatagacaacatgataacctgtctgcttttcaaacttttttattaactttggatctagatagtcgccccagttatagataatcaagttttgtttatttttcccggtagacgatttctccaaatgatgggataaaccccaaaggcctgcacaggcaattaaaatagctgcaattgccatcataatctttttcatttaactaggcctcccatcacacgatgatttttctttctgccctttttagtagtaataaaataatagattcctacaagcaacaagacaaaaatgaacattacggtacttaaagcattaatctcaagatcgattccttgtcgtgcccgagaataaatttcaactgaaagagttgaaaaaccattcccagtaacgaaaaaagttacggcaaaatcatctagtgaataggtcaacgccataaataaaccggaaaagatgcctggcataataactggaattaaaacatcactaaaaacctgccatgaattcgcccctaaatcacgtgctgcatcaataagcgacatatccatttcattaagtcgcggcaagaccatcaaaaccacaatcggaatagaaaaggcaatatgacttaacaatacagaaccaaaatttaagccaattcccaatgctgtaaaaaagatcaaaaaactagcaccaataattacatcaggtgacaccatcaagacattgtttaatgctaaggttgttttcttattagattcttttttcatcgcagcaattgcaattgcaccaaatgtcccaataattgttgctattaaactggacaacagcgctagtaggatagtttccaaaaatatcgctaataagcgattatcttgaaataaagtctgataatgagcccatgtaaagtgctcaaatttattcatgtttttaccactagaaaatgaaaagtaaatcaaataaaaaatgggtacatataataggatcaaagtaaaagcaagatagatcttagcgattaaatgtctgtttctcataaatctaccttctttcttctagcctttttgctagtaatcaacatgactaccaccatcagcgcgattaaaattactccaattgtggcccccatattccagttcattgtggtcataaaatactcttcgatagcagtccctaatgtgattacccgattgccgccgatcagccttgttaacataaataatgacaatgatgggataaagatggcctgaacgccgctttcaactcctggacgagaaagcggccataaaacatagcgaaaagtttgccatttactagcacccaaatcctcagaggcatgaatgactgcaggattaatctctttaatcgcattaaaaattggcaaaatcataaacggaatttcaatgtaagtcgccacaaaaataaaagcaaaatcagtaaacaaaatatttacgggaccaataccaaataaatgtaaaaatttatttactaaaccgtcattacctaaaatgccaataaatgcatatgctttaagcagcaaattaatccatgttggcaaaatgatcaataacagccacagctgctggtttttcattttaattaaaaaatacgctgccggatacgaaattaccaacgtcaacaaggtgatcaaaaatgcataccaaaatgagttaagcatcatttttaaaaaggtaccatttttaaaaaattcaacgtaatttctgagcgtgaatgcgttattactatcagtaaacgaataccagagaatcaataaaatcggcaaaatgacaaagagaataatccacagcagatatggaatcataaaaaacatctttttatttttcattttcatccgcctcatacttttctagtcgagcatcaaaatcgtgttggctttcatttaaccgcatgacgtgaatatcttctggatcaaaaaagagcccaacacgttgtcccaatttaactccattagtagaatggatcagccattcattttcattggcatcaattgccttaatctcaaagtgatcacctaaaaataattgcgtctgtgctgtaaccacaatcttcccatcttctggtttaacaatatccaagtcttcgggacgaataactacttcaaccttttcattaggcttcatcccaccatcggcacatttaaatttattattagcaaattccacttcgtaatcatgaatcattcgaccagataaaatattggagtcaccaataaaacgtgctacaaagtcattcactggctcatcgtaaattgctaccggattaccactttgttgaatctgcccatcatttaaaacaaaaatttcatcactcattgatagagcttcttcttgatcgtgcgtaacaaaaataaaggtaatgcctagctttttctgaattgcccgtaattcaaattgcatgtcttttcgtaaacgtttatccaaagcagatagcgactcatctaatagtaaaaccttaggttcattaacaattgcccgggcaatagctacacgctgctgctgtcctccactaagttccgaaatttcgcggttagcgtaaccgtctagacgaaccatatgcaaagcatctttaacagctggcttgatttcactcattggtcttttcttaattttcaagccaaacgccacattttgaaaaacatccaggtgtggaaacaaagcataattttgaaaaactgtattgatatgtctttttgaagcatcaaggtcagtaatatcattaccatcaaagaggacttgaccactagatggctgagtaaagccagcaataattcgcaaaattgtcgattttcccgagccactaggaccaagtagtgaataaaatttaccagattcaatagttaaatttatatcttttaatgctacaaacccatcatcatattttttggtgatgtgttttagtttgataatatccatttccatccctcacataaaaaacagctgcaagccttccagcctgtagcttgtctttgctaaaatattttacttttctttgccgataatcctaacttctgtgcgtaagtcaatgtcaaacttttctttaattaccttttggatcaaatgaattaaattcaaataatctgttgcagtagcaccgcctttattcacgataaaacctgcatgtttcattgaatcttgagcgccaccgatttgtttaccttgtaaaccagctttaataatcatcggaccaacaaagtgcccagtaggccgcttaaagacactgccacaagatggatattcaagtggctgcttataacgacgtaaagcatttaaataatgcatatgatctaagatctctaacttatcgcctgacttgagtgcaaaagtggcgcttaatacaatatcgccattttcttgaactaatgaatgccggtaagaaaagttcatttctgcgtttgaatatgttttaaattctcctgctctggttaaaacattaacgctttgcactacttcttgcatctcaccgccataggcaccagcattcataaaaataccaccgccaatactaccaggaattccagcagcaaattccattccgctcaaaccatgatgagcagccgcaaaagctgtatcgataatccgtgcaccagcatcagctgtaacttgattatcttctactttaatctcttttaattcagtcaaaataattactaacccatcaattccgccgtcacggatgattaaatttgaggcattgccaataattgttaatggaatttcattttcacgtgtgacttttactaattgttctacttcatcagtcgtcttaggaaaggccaaatattcagctggtccacctgtcttagtaaaagtatatctgcttaatgggatttgctctttaatatcaatccctttttctttcaaatcaagtaattccacgctgttgcctccttaaagtttcttgttttattttaccgcataaaggcgttagcttcattaatattaatgatatacttttttaaaaggagaattttatgaattttattgcaatggactttgaaacagccaaccattatccagaaagtgcctgttcacttgctttggtaatggtgagaaataataaaattgttgatcgcttttatacagtaattaatcctcaaatgccatttgacgcgcgaaatattcaagtacatcaaattacagctgaggacgttaaaaacgctccaacaatggcagaggtctggccccacattaaagaattgtatcaaccaggaatgcttgtagccgcacataacgctcgctttgatactaatgtcatgcggcaaagcctggcacgttacggtattgaggagccccactatttggtcattgacactttagctagcagtaaattactcgaaccagaactgcctgaccacaaattagacacagtttctgaggccttaaacgttgaattgtggcaccaccataacgcattaagtgatagtgaagcatgtgctgggattttaatcaagcaagaagagcaatttggtgatgaagcaatcaaaaatttggtttatcagatatgaaaaatctctaggaattttgatcctagagatttttgctttacttattaaattcagttaacgcagctttgacccattcttcattgcgcttaccatgaggagtaaattcaacaacccgtttagttgaatcccaactatcgtccactctggtaatcgtaagttgcaaatactcatctggcaaatcattcattactagttgtggccattcaattaccactaaacctggttctgctaaatagccctccaaatcaatcgaggataaatcatcattttccaaacgataaaagtccatatgaaagagcggcaacttagcttctcgatattcacgcacaatggtgaatgtaggactcttaacaggccgatgtatgcctaatgctcgccctaatccttgagtcatggttgtcttgcctgcacccaaatcaccatttaatagtaataaatcgtagggctgggccgttttggctagggatgcacctaatttctgcattccatcagcagaattaatttctaactttgtcattacttttcatcctttgctaaagcttgtgcggcagtaacaattgctaaatcataaatatcttgttcactgcagcctcgagataggtcattcactggagctgctaaaccttgcaaaattggaccaacagcagtgaagccacctaatctttgaaccatcttataaccgatattgcctgattgtaattctgggaaaacaaagacattcgcatgtccagctacctttgagtttggagccttcttttcactaactgcaggtacaaaagcggcatcaaattgcaattcaccatcagctggaatttctggatgatccttttggaacatagctgctgcatcatgtaccttatcaaccattggtccttcggctgaacccttagttgaaaagctcaaaaatgcgaccttaggatcaatttcggccatcttggcagtcagagcagattgatagccaatttcagctaaagtttcttcatcaggattaatgttgatggcacagtcggcaaaaatgtaacgctcatcgcccttttccattacgaaagcgccggatactcgatgcatccccttagctgcatgaattaattgtaaagctggcaaaacagtgttagccgttgagtgagcagcaccggaaaccataccgtctgcttttcccatcttcaccaacatggtaccaaagtaattaccttgggctaacttgagctttgcttcagcaatactggtatcttttcgtctagctttaacaaattccgctgccatttgatcaagttcatcataatgattgaggtcatagatcttaacaccagctaagtctaaattattttctttaactaacttagcaatctcatctggatttccaattaaaattggttcgataatgccatcttttttcaaattagctatggcagtaagaattcttaaatcatcgccttctggaaaaacaattcttttcttatcttttgctgcttcaacttgttttttgaataatgaaaatacgctcattttttacctcttatgctaaatcagatttacttatcgtttctggcaattgccagtcaatcggcgtttcatcaaagttcttcaatgccatattacaccgcgaaaacggtcgcgagccaaagaaccctcgatcagccgaaaatggacttggatgtgatgatttaatgataaaattcttactttgatcaattaatggaatcttgttttgagcaaatcgaccccacaaaataaagacgacttttccacgctcactcagagccttaattgcagtatcagtcacatcttcccaacctttgccttggtgaccgttagcatgcccatacggtaccgtcaaaaccgcattcagcaaaagcacaccttgatcggcccacttttttaagtaaccgtgattaacaggccgagctccgacatcatcatagagttccttatagatatttttaagtgatggcggcaaagttgtacctggcatgacggaaaaactcattccattagcttgaccaggattatgatatggatcttgacccaaaattaccactttagttttagcaaacggtgttaatttaaaagccgtaaaaatatgatacatatcaggataaatttgtttagtagaatattcttcttttaaaaaattatgcaattcgtgatatttctcacttgcaaaaacaggatccaatacttgatcccaatcgttgccaattaattctttagccaagtcttacaccctcttttcttctcctctttatggtatcattaatttaatactaaatgggagagaaattatgatcaaattagttgcttgtgatcttgacggcacgttgtttaattcagagatggctgtttctgctgctaatgcaaaagctgtgaaaaatgcacaaagtagcggcattgaatttttaattgcgactggccgggccccacgcgaatcacgttcagttctcaaagatgctgatttgcataccagttttatcaatcttaatggtgccctggtttttgacgaaaatgagcaattaatgatcaaacacagtattcccaaggcaaaagcacaacagctagtgcatttactacatcgatcaggcttttactttgaaattttaactgccaatcaggtttatagtgaaaatctagatcaacgtatttcaaatgtagctcatttaatggtagatctaaatcctctacttgattttcgtcaagctgtagcaatttctgctggtaataagactattatgaatatgaaacaaatccacagtttcgataatttattgcaagatcctaaaatagaagtaatgaaaattattgcttttgactctcggggacatgaagcttttaccgatatcaaaaaagaaatcgctacaatgggcgatctagtagtaacttcaagttcatcttctaatattgaaatcaatgagcaacatgctcaaaaaggtcttgccttacttgattatgccaagttaaaaggtatcgagcctgaggaaatcgctgcaatcggtgataatttaaatgatgagagtatgatccgagcagcaggtactggcgttgcgatgggtaatgcgattccagctattaagaaaatagctcaggtagtcaccaagcgaaacaatgaagatggagtagcttatattttaaataaatttattgcagataataacaatatttaaagttatgaggtgagtaagtatgcgattttggctagaacttaatcaggaaaaggattacggtcaaattcctgtgcttaatcaaaatggaaaagctgaattttttattcaaggcaatcttgataatccaaaccacactttatatctaaataatttccgtaaacaggaagtgggacgtctgttttctgatggtgcgggcctaattgcttcgttcacaattgatgtcgtcaaccactctttagtaggcgtaaaaaagttaaacacacctattgcaaacatattctatttgacccaattaaagtatattgttacaggtagtattaaacgtggtacttatacttttcgttctggaatcaagagtgtagcaagtgtccaaacaatcatgggagatcgcggaggcgttttaatttgtgatattactaagcctgaagacgtcccctttattcttttgacatccgttctatttacacaatggcatgttacgcctttgaaactgcctagttttccgccaattggatttgaggtaaatccaaattaaacaaaaaagcagtcatgaaaattttcataactgctcttctagaaagtgatatagatatagatgtatcttctgccataaagtttatatttattaagtaataaggaattattaggcagagactgaataatgaaagttaaatctaatttgattcaacctccatagcttattatacttcgttcagccaaaaatacaagggctagatgttattattttactttaaagatagctaaataatgcatttagagctagcttatagcttaataatttgttatttaacttagtacatctatttttctaaacaagacaactttaatttctacgtaaattgcaataataaattgaacacttttaatcaagctgcttgatagattagatctaattctctttcaaagatttcatctggtgtatgatatgccaatatctttcttggtaaagagttgcaccaggtttcaatgtctatgatgtcttgtagtgaataattgtctattgcctctcccttaggaataaatctgcgaatgagtccattatgtctttcaacggttcccttgtcacaagatgtataaggatgagcatagtaaactaaagtatttgatacgtcttctaagcttgaaagatctgcaaactctgagccattatcagtggtaatggttttaaaaatatcattccaatgttcgctgtattgcctttggagttctttaaaggcctgcatgacactgacagaagtcttgtcaggaatacgaagaattaagaactcacgactcatacgttcagataaggttagcagcacctcatcatctttgctcttatgtccgagaactaaatcgcattcccaatggccaaactcattacgtttattgatttctttaggacgttcttcaatgcttctgccaagttttttcttatttctgcgaatacgatgaagcttggtattgcgtttaagcttctctggcaagtcgtaattatgtatatctaatagaccttggtcgacataattgtaaagagtcttagtacagacaacatctctgctgctaaatgcgccaacagcggtggcgcgattactgcacacatcaagcgaccagccgtctttaaagaaatgtttgtggacatagcgcatgaattgagttttcctgagaaagtctgatttacgtccacaatttttacgatgagcttgatatgcatcatgcccttgagtagccttatatcttttgactttgccatgatacagttctacagtaccgcgcttaacctcataactgatagtagaaggggaacagtttaattcacgggcaatggcacgcaaagaatagccatctttcaaacgcaattgaataataactctttcctcgaatgataaatgcttgcctttaatgtgatgattcatggtagaatgtaaagagtccattttgacctcgtttctaaatgttgtgtggtaactacattctatcaaacaggtccgaatggactttttattttttattaagtgttcaatttaattttacaatcagcgactttaatttctattaaaaaatatagtgaaatgatcaagtgatttatcaatggcttgatcatttttatttactttatcaacgaacttgtttttagctatcaaactatataaaaaagagccaaatctaatgatttgaccctaaaaattctagattattaatctaaattattttttatgaattagtcttggtagtttaccaattctaagaatgattctggtactaatgaagcaccaccaaccaagccaccgtcaatatcaggcttagccattaattccttaacgttagctggttttacagaaccaccgtattgaatacgaacgttttctgcagtttcttcgttgtacaagtccttaacagtttcacgaatagtcttgcacatttcttcagcttgatctgatgaagcagtcttaccagtaccgatagcccagattggttcgtaggcaataacaagtgaagatacttgttcagcagttaagccgtctaaagcagccttaatttgagcaactacccagtcttcttgcttgttagcttcacgagtttcaagtgattcaccacagcaaatgattggcttcaagccattagcaaagattgccttagccttcttgttaatgtcttcgtcagtttcgtggaagtaaccacgacgttctgagtgaccaataattacgtagtccatacccatttctttcaagaccttaggtgaagtttcaccagtgtaagcaccttcgtcttcaaagtaacagttttctgcaccgatatgtaagtttgagccttcagcagcttttctcaaagcgtcaaggtcaactgcaggtgcacaaataagtgattcaaccttacttgggtctggtaacttatccttaacagcgttaacgaattcagtagtttgttctggattcatatgtaacttccagttaccagcaataattggtgtacgactcattaatctattgtcctttccttactattacttgtctgaaacgcaagcgatacctggcaattccttaccttcaaggtagttaagtgaagcaccaccaccggtagaaatgtgggtaatcttaggagcaatgcctaattgcttagcagcagcagttgagtcaccaccaccgatgatagtagttgcatccttaaggtctgccaatgcacgaccaacttccaaagtaccttcagcgaagttaggcatttcgaatgcacccattgggccgttccaaacaacagtcttagcatccttcaagatttccttgaacttttcaacagtcttaggaccgatgtcaagacccatcatgttgtcaggaatatcatcaccaacaacttcacgtgaagcatcatttgagaattcagttgcggctacgttatctacaggaagaacgatcttgtcgccagccttagcaagtaattccttagcaaggtctaccttgtcagcttcaaataatgatttaccaatgctgtggccttgagctgctaagaatgtgtaagccataccaccaccgattaaaatatggtctgacttaggaattaagttttcgataacaccaatcttgtctgaaaccttagcaccaccaagaatagttacgaatgggtgtactgggttttcaacagcatcacctaagaacttgatttccttttcaagcaagtaaccagctgctgcaggcttgccagcttccttcatagcagttgcgataccaacgtttgaagcgtgacttctgtgagcagtaccaaatgcatcatttacaaacatgtcgccaagacttgcccagtattcgccaagcttaggatcgttacctgattcacgcttaccaaagtcgttgtcgatgtcttggaatctagtgttttcaagaacgataacatctccatccttcatgttgttgatagcgtcttcaacttctttaccttcgtttgatggtacaaaagttacaggcttcttaagaagttcacttaaacgttcagcaactggctttaatgataattccttcttgtcagcatctgacttaacacgacctaagtggctaagtaagatagccttgccaccgtgttcaatgatgtacttaatagttggaagtgcagcaacgatacggttgtcgtcaccaataacgccatccttaattggaacgttaaagtctacacgtactaagacctttttgcctttaacatcaagatcgtcaacgattaatttagccattataatcctccgattattttgatattttttcttcaaaaaaaggcggaaggaagaatctccctccgccttctcaattaccacttaactatataatcagttaattaaaattaatgattaaagagttgcaaagtgtaataaagtacgtaccatttggcaagtgaatgagtattcgttgtcgtaccaagcaacagtcttaactaattgcttgtcacctgcagtggttaccatagtttgagttgggtcaaagattgaaccagcagtcatgttaagaacatcgctagaaacaatgtggtcaccgttgtaagcaaatgatgggctttcgtacttcttcatagcttcgttaacttcgtcagcagtaaccttcttgctcaagattgataccaattcagtttctgaaccatctggaactggaacacgttgtgcgtgaccgttcatcttaccgttcaagttaggcaataccaagccgatagccttagctgaaccagtagtatgaggaatgatgttttcagcagcagcacgagcgtcttgttccttaccactacgtgaaggaccatccaaagtcatttgagtaccagtgtatgcgtggatagtagtcatagtagcaacttcgataccgaattccttgtccaaagcgttagccattggtgcaagtgagttagtagtacatgaagcagctgaaacaatcttgtcatcagcagtcaaagtgtcttcgtttactgagtaaacgatagtcttcaagtcgttaccagctggagctgagatcaatacacgcttagcacctgcatcgatgtgagcttgtgacttagccttgctagtgtagaaaccagtacattcaagaacgaagtcaacaccatcgttcttaacccatggaatgttttgtgcttgtggttctgcgtatacgtggtaactcttaccgtcaactacgattgaatcttcagttgatgaaacttcgtggttgaaagtaccatgagtagtgtcgtacttaagcaagtaagcaagcattgctggagtagtcaagtcgttgatagcaacaacttcaatgtcctttgacttttcgccaaggtccataatacgacggaatgctaaacgaccgatacggccgaaaccgttaataccaattttaactgtcataacctaaagtcctccttaagaactataaacaacatttattttaaacgggatttcatttcccctttaaaatcatatttgaggcgccctcatcagtgattagccaggtttgatgaggcgcattaggcatataagctttaattgcttgagcctttcgggcaccacaagcaaaagcaaatatgtggggtattttgtataggttctcgaactgcaatccaacctgggtgatgcggtcaacaaccttgccatgttcatcgaagaaacacccgaaacattcggtgacggctctcttctcacgaagttcagatagcttaattgaattatagcctctgcgctgtgccatttcttgagctaacccaataccatgaatcacagcatcactttgagaaatgtcttgcagaacatctgcgatcgaggactcacgaatcaaagatttgtaagcatcatctgaaacctgctcaggtaaatataatgtcttataagtacctgaagtcttagcagccatttcttggacgattgtattactttgcgtctctacattttcgcccaaagctcctcgacctggaacaaattccaactggcgattgttagctaaatctggtgataaatacttagcagatctagctaacgccgctccacctagaattgtaactattgaatggcctaaaggcaagagtaaattcaaagctgaacttaatttttctcccatctcctcatatactcggtcttggaaatccgcattaccagggacgatcaatgttctttcaatccctaattttttggctaatgctacttccgtttcaccggcattaaagaggcgatcaagcaatggtcctgcatcttttaatgttttctcacccttttcagttaaaaacatcccaaaactttttgtttcaatcaatcctaattgacataagtactcagtctcagttctgatgtttctctctgaaagccctaaatgctgagcaacactccgacgtccaattggcgcatgtagcgaaatctgctcaaggacaagatacctttgtcgaagaatctttaagacgtcgggaacgagcgcttcgagcaaagaaaagtccgaatccatcgttccctcctttccatgggacatctatcgaccacctacgtgtcgttttgtgtcccagaatgcttaaaaatataagagaaacgtacttttcattcaattcatacatttcccaatcgacactgttagtataacaatgtatttttcgtaattcaagaaaaagatacacgattttaaaaaagtcgtaaatcgagtaaaatcatttttatttcattactttttttgatatactaccacttgtgaatcatctgggcccttagtgtaatggatcgcacataagattccggttcttagaatctgggttcgactcccagggggcccatataactacatgttgaagactaccgccatctcggtattcttctttttttataccaaaaaagcattcctcacggaatgcctttttcaatatcacaattatttagtgcttgtagtcatcaactcagcacgttgtgctaactcagtgtacaaagttgagcctgaaacagataaaccttcaatttcacggcgagtgttgaaatgatggctacccttataagtaccatttgctgctacacggaagatgtagtcgttaaaaccaatatagaattgattgtggttgctgtcataagcaaaaccttgaactggtgaaccagttacgaaattactttgagtagcaccgatttcttctggagcccaagtgtcaccatttctagttaacttccagtattcatattggtgacgaccaccattgtggaacaatgcatacatagtgttgtcgccaacaaaggttgcattatggaagtaacgaggatatgcactgctgccgttccaggtcttaacagtccagattttgttaatcttcatatcactctttcttacttgcataatttcttctgaagctgttgaattagcagtcttattgttattagccaaaacataaatgtagcttgaagaagagccaagtgattgaccatgacctagcttaatgtatggtgaaactttaatattgtttgcgtagcttctaaaagtgctccatcccatagtagttaagttttgagcagcatatttactcttaattgcattcaagttgtaagaaacaagatgtcctcttgagtcgctactgctagtgtacatagaagctgtaaaaataccatcattaacagtaataccttcaggaattaccccaacttgtcccattgcatcagcagcttgaccatagcctaagctgacaaaacgtggttggaacaaacgagtgcgcaaagtcatgccgttacctgaatagctatttgagctagtttctgaacgataaccgtgtgcctgattccaatttcttgatgatccctttgagccaccattccaagtatgaactgccttaggaccactcttaacagaagcacctgcactagtaattccttcatttgtatctgaacgaacagttacattaacgcttgcctttgccttaccatatgaataatctaccttagtagtgccggcacggcttgaactaacagagctatgtgaaacattaaccctatctggattaattgcagtaccttgtccatctgttgcatagttaattgcatccctagttggaaaactgtagttgctgttgtgaactaagctaacatcttgagctactgaaatttggtttctagcaaaaaagttttgacttacccaacctacattgcgtccatcgacaataatgtaccagaagttacctttcttggtagaaacatacttcttagattgaatttgaccatgcttaaagtacttggtatttgaaaatgcacctgatggtccttttttagatacattatgataaatagcgtaattaccattgccagcaatcttagtaactgccttgctgtagcttttggcatctaccttgctttgactaatggcaaaaacaccaccaactaatgcagcactggccacaaaagttaataacatctttttcccttttaacatccttattaatcctcccatatgaaaaaatcacgttcattttagcacaaatttatcaaatgaaacatctaattattaaaaaatttcctgaacaacaagactttgaaaacgcttctgttatataattaaaaagttcacataaatatataaatagtaatagggagaaattttatggtcgaatcacaaaataattccaaaaagatgatgtggaccaccctagcaatgatggccttctctaccgtgtggggctttggtaacgttgttaatgggtacgtctactttgacgggacaaaggttgtctttagctggatcgtcatgttccttctctactttgttccttatgccttaatggttggtgaacttggagctaccttcaagaatgctgaaggtggggtttcctcttgggtaaatgccactatgggcgcaaaatgggcctactacgcaggttggacctactgggcttgccacgttgtttatatttccagtaaaggtactggtggtttaagagcgatggcctggggtatcttcggaaatacaaaatggtatgatggcttacctaccgcttggacacaatttgctacattagtagtcttcttgcttttctgttgggttgcaagtcgtggtattccagtattgaaaggcctagcaacaattgctggttcttcaatgtttatcatgtcaatcttattcatcattatgatgtttgccgcaccagctattaatccttctgctggtttccacagtattgactttaactggaagaatttgatgccaaccttcaacgtaaaatactttacttctctttcaatcctagtatttgccgttggtggttgtgaaaagatctccccttatgttaataaggttaaggatccttccaaaaacttccctaaggctatgatggctttagcaatcatggttatggtatctgctattttaggtacttttgccatggcattaatgtttgaccctaaggtggttaatgccaaccttaacgaatacatctctaatggtgcctacatggcatttgacaagctgggcgaatattaccatgttggcggcttgttcatgtacatctattcatggtgtaacgtaatcggtcaattctcaacattagtaatcagtatcgatgcaccacttagaatgcttttgggtagtaaagaagctaaagaatttattccaaagggcttattaaaactcaacaagcatggtgcttacatcaacggtatctggatggttgttgtcctctctggtggcttaattgctattcaagctttagtaccaaatgctcaagctgttatggcacaattagttaaattaaattcaactactatgccacttcgttacctttgggtatttgcggcatatgttgctttaagaaaacagcagcaaaagttcaacactacttatcaaatgactaaacatcaaggcttagcctatactgccggtatttggtgttttgtagttactgctgcatgttgtatcttgggtatttactcaccagatccatttaccttattccttaatatcttgacgccaatcgtcttgattgcattaggtttaattttgccaggaattaagaaatatcaagaagcaaaggcaaaataaaatttaaatacagaattttaaaaaggaagcaatttcaaaagactgcttcctttttagtgtatatttttatttattagcccaagcatttaccaatgccttgtacttggcaacgctaattcctgcacctttactgcttcctaaatatgaatcagcatttccataaccagtattgcttacattggcaaatcccattactctataatttctgttaatcaaattcaagtagtgtcctgccattttatagccgttcgtgccctctacggccgcatcataagttgccgtccaagttggactatacttcgccggcttcaacgaatgattcttttttacatcataattccaacttttcttttcagagaaccaagtatcaaccggatctaaacccacactttgagtagcgatgttttccaaaccaatcgacttgaaataatgagtatgctttaagccaccacgtttttgatagtcagcatttaacattgaggctgctgtcaaaagtggtgacacctttaatgaccgaaccccttcacttctacgtgctctattgacactattcaaataaggcaatacagctttaatattcttagcactagttgcatcatcatttgaatgcaagtcaacgtattcattgtaccaacttgccttaggctttttacctaagcgacctgttttcaataatttcactgctgatctagcagagcttctttgccctttagtcaaagatttgtttttagatagatatgtcataaaatcaacggcatttttggctgccttaactggcttggaactcaataccgttaaagataaggtcatcatcacagctgatgcacctgcaattaaaaatcgttttttcattctttttctcccatattaatatatgtgaactacgatttaattgtagcacatacactaatggaagattttccttttaaattgcattatccatccatcttaacgtattgtcctttttcatctacaacacctttgaaatggtgcatgctgccatcttcggcctgaaattcacctaagtcaatttccccatagccctttgtagaatcagtaaccttaacatcatcaaaagtttctctgaaaaattgatgaacaattctactcttcaaccgtatatcctttgaatgctcaaaggctgcagacaacgtaaagccctcatctaattgttccttgataaaaacaattagatacaaggtcgctaaattatagcggcgcacaccactttgatcatctgaaatcggcttaatgtagcccttagtttcccaatagcgcaattgcctttgcgaaacaccggtcaatttactaacttcaccgattccaatttctaaattttgaaaaatgtcatgcataatttttttagatttcatcctgataccaccttacagtatagttatattttatatattgttgttatcttttgcaacacttgtgttaatttatctaacttatttgtaagattatttgacaatggaaaattttaagcctatagtttttatagttaacttttataagagaaaggaatattacatgaacaagcaaccaacggatattcatggaaaagcttataatcgaaacctactagttttagttttaattataggttctttctgtactgtattaaacggaacactgctttcaacagcgcttccttcaattatgcgttcatttaacatcagcaccgcaactgctgaatggctttcaacagcctttctgttagttaatggtgttatgatcccaatttctgcatggctaatcaatcgcttcggttcaagaaaaatgtatttgtcagccatgtcaatcttctttattggaacagtgatcgccgcaattgcacccaattttggcaccctgcttgctggaagaatcattcagggattaggcgtcggcgttactatgccacttttacaaacaatcatgctttccatcttcccagctaataaacgtggtgcagcaatgggaactgtcgggattgttattggcttagcaccggcaattggaccaacattatctggttggattgttgataacctttcttggcgttatcttttcagcatcattgccccaattgcgggaatagtaattatcttagctttctttttaattaaagatgttttaccaactaagaaagaaaaaattgatgtttggtcagtaacaacctctactctaggcttcggaagtctgttgtatggtttttcagaagctggtaacaaaggctggaccaatcccgagattttaggatttattggatttggaattatatttgtaatcctattcggtatccgccaattgaaaatggatgacccatttttggacattaccgtttttaaacactttgaattttcactggcagctgccttaagtggtatcaccaacttagcgatggtcggcattgaaatggttttaccattatatattcaaaatttgcgtggcgtttctgccttccattcaggtttaatgttactacctggtgcattgatgattggtattatgtcgccaattactggccgtttattcgacaaatatggtgcacgtaaaatggcaattactggtatgactttgttgaccattgggactattccattcgtctttttaactgaacaaagttcatacacgatgattatcattctttacgcaatcagaatggtcggtgtagctttggtaatgatgaatgttactacatctggtatgaattctttaccattaaacaagatttctcacggtactgctgttaacaacactttcagacaggtattaagttcaattggtactgcaattttggtatctgttttaactacaactaccaataataatatgcctggtaaaagtttacttcatgcactgccacttgaatacaagactagagcaatcagtgcaactttagacggttttcatgcttcatttgcaatgagtatcctcttctcattaatcgcattagttctttcattcttcttaaagaagggcaatcgagcacgtgaacatcaagaaaaggtggatggttaaatgatacttttaattctaatcgtagctgcaattatgtttatttactttaatatcatccctggaaaaaggcatacttctattgcatggctatcattaatcgtaacaattctttgtgttgttggcattgtagaacatgattataatcactggggaatgaaaactgaaacaacttcaagcactaatactctagtttccagtgctactcctcgcctgccaattttgctttatcagcctttaggtaatggaactgaaaaagtttacctttataaaactggtcagcttcaaaagaagccaaaatctattaaattacgcgtggtgctagttaaatcgttttagttaataaaaaagtccaatcttgttagactcgacttgtaaatagtaataatagaaaagagtctgatctgattgaactgccttaagcttaagcgttttagccaccatttacaagttagttttaaagatttagtgataatttgtcggcactggtatcgtttgtatgcaccggctgagtttactcatcggcgaaatattgatcaaattaaaactacggacagtctgattttggctttacttatctggcaagctaagacaggaattgaatcacaaagaagattctgtgaatgtttcaattgtttatcacactcacgttttaatcggcgttcacgtcagctattgcaattgatttatcagatacggcaagaaatgaataaaaaggttgacctgaatggacagttcttgatcattgacagctttccggtacctgtttgccaaccaattcgaaactatcgtgctaaaatttttcgcggttatgccaacattggttataaggccaccaagaaaatttacttctatggtttcaaagttcatgccattgttagcgatgacggttacattcttgattatgtcgtaacaaaggcatcagttcatgatgccagggagacagttgaactgatagaaaatacccatccatctaattactatcttcttggcgacgaaggctatttaggcaaagaactgcatcaacagctaaaacaaatgggttacgaactttggacaccatatcgtaaaaatatgacaggagctaaaaagcacaatgatcatcaattgatggctattcgcagaacaattgaaagcgacttttcgcttctgacctattacaatgccgagaacaatcgagcacgtagtctgataggctttcaaagccggttggaaattgcaattttagcttataatttggcttattgtctagaacgatttaactagcaccacgcgtattaaattagataaagtatcgacaaaagtaaaacgaagcagccaaccaaaagtaacgattaagactactcgctacacctatagcaatacctttaatcaaataatgtttggcgtctttggtcatgacaaggagttaaaacacagagaatatattttttctattccctccaactggaaagtaatgtcagttaacgatgccaagcagttgcaaaaacaaatgatgaaaaaacagcagtttttaaaacaaaaatcagcccaataaaataatgaagctcaaactttgatcatgatatgaaccccgaaattcggacatgaatttcggggtttttatttatggctaaattatctaaacatgacaaaattgatatttacaatagctagaaaaattaaattcattttaactcaaattttaccatatgatttaagttaacttaaatcacctttacaaacgcttatgaaatataatttaactaaatctaaatgtagaaaattatttttatcatactgcctatttcaattgcatcctatcattaaagtaatttttataagccaaatagccactaatcacggctccaaggccagtggcagaaagtaacataaatgtaatcataatctgatacttaattgcataaatgggatttacaccagcaaaaattaagccggacatcattcctggcaaatttactaatcctacagttttagccgaatctatcgtaggctgcatcgcagtcttaatgctccttcttaaaattggcatcgatgcagttttaatatcactacccaaagccaacttttctaaaacttgttgatgcagatcattaaagctatcattcaacgctttatagcataagccaactgccaccatttcatttccagcaatcatccccgtaatgggaatgacctgcatagggactggtttaattacgccagaaaaaatcagaattcctaatgtcacgtaagtccctaccgcttcggctattatcgaattccaaatattccgccccggattaggatcacgctgattagcattccaagatgcattaaaaattatcacaatagttgaaaccaaagttagccacaaggcattaacatgaaaaataaacttcaaaacgtagccgattacgactaactgaattatcgccctaatcacgctaattaaaatatccttggttagtcctaatttttctttcgcagaaattccaatggaaactaacaccagtgcaaaagctaatactaacgaccagttgctaactacaacatttttcattcgattattccgcctttttttactcttaaaatattacttgcttcatcaatttcactttgatcatgtgtaacttgaataattgtcacgcctttctcagaaacatccttaatcaaattatgtacaatatctttactttgattatcaagcccggtagttacttcatctaagagcaatatctttggtaaaaatattatgtttcgaattaacgcaactctttgcttttcaccacctgataaagcagtaatctttttatctaaaaaatcagcagagagatcaacttgattaagtaaatcagctatttgcttgtcatttacatctacttttctaatttcatacgggaaaatcaaattatctcttactgtttgcccaaataaagacggctgctgaaaacaatatgaaacttctctacgatattgaactggatttaaggagctaatgtttttttcttgatatagaatatcgcctgaattagcactaattaaatttgcaatcaatcgtaaaatcgtactttttcctgcacctgatgggccaattaaggttagaaaatcgcctttattaaccttaaatgatacatcttgcaatatttgttttttatctgcactatattggatatgttttaattctaatattttcattcttttgcctaactaaataactcatttttctaattatacaactaaaaaaataaaggaaatccaatattttcattgaatttcctttatttaaattaatatcgataatgattacttagtcaacttttgtttactttcaagtaattcagcacgttgagctaagttcatgtataacttgttgttgtaggttgcgataccttcaatttcacgaccagtgtggtattggtaagtatccttaacttcaccatcagttgcaatcttagcaattacgtcattgaatgcaaggtagaagttattgttcttggcatcataagtaaacccttgagtgtatgtgtttgctacaatgccacccttagttgcacctaccatagttggataccagttatcgcctttgcggttgaattcccagtattcagtttggtctttttctttattataaagagttgtgtaaagcttgtgatcatttacaacaacaccattattgaagtaacgaccgtctgaatcactaccgttccagcatttaatagtccaaatcttgttaatgcacatatcgctcttccgaatttggattaactcttcagacatattgctcttgtatgaaaccttattattgttatttagaacgtaaatgtatttatcagttgagcccattgcttgaccgtgaccaattggaatatatggactaactttaatgttcttaacgtaagaattgaacttcttttggctcatatcaagtaagtattgtccgttaaatgcattggttaaatggttaagattatatcctacaatatgaccattgctaatcagggtactacttaataaactagtgtacaaccagccatttgacatggtaattccttcaggaatatgacctacacggttaatatagtcatcatttttaatgtcacggtaaacacttaataaaactggttggaagaagcgagtagtgaaatctaattttccgctttcactatcataagcatgcttattcttatcaggagtaaaatcagtcttagttacatagttagcagaactgccgtagtaagtcttccaggatttcaaatcgccgttaaatggcttagcttggacgctatcagcatcagcaattccttccttagtactctttctgacagttaccttaacagttgcctttgctttaccatagctatatttaacattataggtacctggagttgagcaatcgattgcatcttctgaaatcttaatatctgctgtatcaattacagtacccatataattggttacataacttactgcatcagttggatcaaaatcgtagtgactattttgtactaaactgatagtctttggtacagcgatagcatctcttgtaaagtagttttggttaacataaccaactttacgaccatttacataaatacgccaataagttgcatcctttgtcttaattctctggtcagattgaatatgagcatattgataatcgctagcatcagcaatcttaccactaggtttaccattactaatctttttataaacaggataattcttattgctacctactttaaccattaagtcataagaagtacttgtttgagctggtcccttcttcgcactggaatcagtcttagcagtatctgtattactatcagtagttttagaattatctgcaaatactgcatttgtagaaccaattaacaaaccaacacccagtgctacagctgaagtagcagttaaaattttatttgaatacttcaaacctatcctccgtatcttatattttgcattttacttttatattataatatataaacactgttagctaaaatacatttttattaccattgttaccattgagcttctttatttgacactttcattacaaagtgatttaattagcactgtacttgaaagagtgctaattaatacgaaatcaattaggaggcaaatttatgctagtacctacagttattgaacaaactgctcgtggtgaacgtgcttatgacatttactcacgcttattaaaagacagaattatcatgcttagcggtgaaattaatgaccaaatggctaactcaatcatcgctcaattactcttccttgatgctcaagacaataccaaggatatttcactttatatcaactcaccaggtggtgtaatcacctccggcttagctatcatggataccatgaactttattaagtcagacgtatcaactattgcaattggtatggcagcttcaatggcttctatccttttgactagtggtaccaagggtaagcgtttcgcacttcctaactcaactgttttaattcaccaaccattaggtggtgctcaaggtcaacaaactgatatccaaattgcagctaacgaaattttgaagagccgtaagaagatcaacgaaattttgcacgaaactaccggtcaacctttggaaaagatccaaaaggatactgaacgtgacaactacttaactgctgaagaagccaaggaatatggtttgattgacgaaatcatggttaataagaagaagtaattaattattaaaaattattcacactctaaaaggagcttgcactcattgtgcaggctcctttttcttattctcttaaactctcagctaactcatgtagtttcttaaatcggtgattaactcctgacttcgaaatcggaccatccggaatttgattagctacttcctttaaagttaattctggatgcgccaatctaaaacgcgctaaaacttgcaatttctctggtagatcatctaagccgttttcttgttcaatcagctggatgtcttctacctgcttagctgaagctgaggctgtttttttcatattcgcggtatcacaattaaccaagcgattaaccgaatttcgcatatctcgcataatacgcaaatcttcaaagttaagcattgcattaagtgcacccactatatgcaaaaagtcgccaatttttgcggcttcttttaaataaacaatatagcctcttctacgtttagttgctttagcatttaaataaaaataattattcatcaacttacataaatcctcattatggtcctcataagttgaataaatctccaagtgataacgactcgtttctggattattgacactacctccggctagaaatgcaccgcgtaaataggacattgctccttcacgtgaagtcataattctctgcggaattcgcgttaccaaacctttttcaggatcccagatttgtaagttttctaggatttcttgtaccttctgattcaatcgtaccaaatattgattattttttttcaatttcatcttgcgcgagacaatcagcaatggctcaataccataagcaatcttaatcagcttaaaaattcgtcgagcaatcgcaggattttctgtagttatatctaggctaaattgatgatcgtgcaagtttaatacaccattcattcgcaaaaaagcagctaactctgctttggcatgctctggatgcacctcaagcgaagttagctcctttttgacttcactagcataactagccatcattttccttcattcttttacgtgacattgattcaaatgccagattaataatttcttttcctaccttttcaccatcatgaaataccaatccatgacgttgatcgataaagtcatcagtaatgacacggcagttttgctttcttaagccttcaaagtcattcttaacaggctcaagataagcatcataatcttctgggtgaaatttgctcatatcaattttggcaccattaaccagagcggtattgatataatttccacctaagtgatcgttaattacctgtacgtgttccgcatcactaaagtgatctgtctcaccacgctgagtcatgatattgcaaatataaataacctcggcgtcagtctcacgcactgcttcacctaaattagagatcattaagttaggtaaaattgaagtaaataaactacctggcccaagtacgactgcatcagcttgcataatcgaagccagtactggtaaaacagctctaggctcttcatccgaatcagtatcggtcacccagacacgcttaatccgcttatctttagatgtgatttcagtttcaccagactccgtagttccatccacgaattctgcgtttaaagtcaatggttcattggatgctggaaaaacatgaccatcaattttcatcatttttgacaaagattgaactgcatcaaagatattgccatgcatttcattcaatgccgcaataattaaattaccgattgcatgtcctgaaaaaaaggaatcggatgaatcaaatcgatactgaaaaatattcttttcttcctgaggtaagtcactaagtgataccaaaacattacggatatcaccaggtggaactacgttaataaagttacggattgaaccagatgaaccgccgtcatctgaaaccgttacgattgcagtaatttccgcgttttgatcttttaaggcattcaaaataactggtaaacccgtaccgccaccaattacgactacacggggacgtctgcctttaatcacgcgaacaatccttgtttctccatatggcacaggtgcgcacctactttctaatataacgactcacttcacggtgagtaatatcgactggatattttttagctaaatctcttgccaactgttgggcaattgaaacactccggtgttgacccccagtacaaccaattgcaatggtcaacttttccttcccctctttgatatatccagggatagctgtttcaagcaaatcaagcaattttttataaaagacctgtgtttcttctttgttcatcacatagtcaaatacacgcttgtccagtcccgtaaatggtcttaattctgaaatataaaatgggttaggcaaaaaacgcacatccattacaatatctgcatcaattggcatcccatacttaaagccaaatgacatcacttcaattgaaaatggctgccgcttgcgatcactaaatgtattgattaatttttgctttaattccttagtcgacaagtttgacgtatcgataatataatttgatctatttttaattggcattaaaatacgacgttcttcttgaatgccatcaagcaagcgacctttgccattattggctaaaggcggaagacgccttgtttctttataacgagcaaccaagacatcatcggaagcatccaaaaataggatagtagcttgcacattgccattatcttcaagtgaattaacttcatccaataaatcgcgataaaatgtcttaactcgtaaatcaattactacggctaccttatgaaagtcattggaattattaattaaatcccaaaaactacctaataaagttggaggaagattatcgactacaaagtagcccatatcttctaagtcatgagcgaccacagttttacctgctccgctcatgcctgtgactattaataattgttttttctcatcagccatactgaaatcctcctctttacaaattatatcataccgggtgtgtcataattgtgcaaaaaaaagaagcctttcggcttaaatttttatcaaatattaacggtgcataaatgcaaccacaatttcattaatgccaaagactaataaccagaatgcaactaaccatactaagcttaaggctgcgattactggattaataattaagaagaaggcaataatcaaacttaaaatattcaaaatcaagttaaatacaaagtatccggttgaaaatgcacgtaagtgccatgaccaagcaatacctacaactgaatcaacaaagaaccagattgcaaataagtaagcgatagtcaaaccaccaatatcatatgagcaaatgaacaagataccgataatgatatctaatacacctgacacaattgctacccaactacgtgagaaaaattcacgaaagcgtgagtaagcagccaaccatacaataccttgaacgattgatacaatagcaaaaatcaagacaaatgcatgcaaccctttagctgggtgacgtaataacacgaacgcaactacgaccattaagataccggcaataaatgcgccccagtcaaagccgtgattatctctagaactagaaaaaatatccatttttattcctccttgcagactattttacacttattcaaggttaataaaaactattggctattgtcttctagcctatttttttgcttcttttgttagtttagtatcacgttctaagactggtttcaaatactgaccagtatagctttctttaactttcgctacttcttctggcgtaccggtagccacaatttgaccgccacgttcccctccttcaggacctaagtcgatcagccaatctgcatttttaattacatcaagattatgctcaataattaaaaccgtattgccttcatctaccaaccgctgcaaaacttctaataaacgcttgatatcatcggtatgcaaaccggtagttggttcatcaagaatatagaaatttttaccagtagaaagcttttgcaattcagcagctaatttcattctttgagcttcaccaccagataaagttgtagcggattgacctaatttcacatagcccaaacctacatcaacgatagtctggagtttacgctgaatcttaggaatattttcgaaaaacttagttgcttcattaatcgtcatatcaagcacttgagcaatattctttccccgataagttacttccaatgtttcagaattataacgagtgccgtgacaaacctcacatggtacatatacatcaggcaaaaagttcatttcaatcttgataattccatcaccatgacaggcttcacaacgtccacctttgacgttgaacgaaaatcttgctttagtataaccacgcaattttgcttcattagtttgagcaaataaggttctgatatcatcaaaaacactagtataagttgcaggattactacgtggtgttctaccaatagggctttgatcgatatcgatgattttttcaatattcttgtaacccttgattgacttatacttacctggcttagttgaattattgtttaatttttgggctaaagcgcgtttcaagatcatattaaccaaagtagatttaccagaacctgagacaccactgaccacaataaatttgcccaacggaaaatcaacattaatattctttaaattattttcttgagctccagtaattgtaatctttttaccattgcctttacgacgcttcaatggaaccggcacaaattttttaccagacaaatattgccccgttaaagaatcaggattctgctctacttctttaggagttccttgtgccataactttaccaccgtaaacaccggcaccaggtcccatatcaaccaaatagtcagcttgccgcattgtttcgtcatcgtgctctaccacaattaaagaattgcctaaatcacgcattctctttaaagaagcaatcagccgatcattatcacgttgatgcaaaccgatagatggttcatccaaaacatacataactcccgataagtttgagccaatttgagttgccaaccgaatacgctgagcttcaccaccagacaaggtattagctgatcgagaaagagttaaataatctaatcctacactatccaagaatgaaagacgatcgcgtacttcctttaaaatcggcttagcaatcatagtctcttgctcgcttaatttgacgtccttaaagaaatcaagtgctttatcaatagaaagctccgaagcttccgcgatatccttgcccatgactttcactgctaatgctttttcattcaaacgcttgccgtgacaagttgaacaagtaagttcagtcatatatttgcccatcacatcacgcataaacttggacattggtcgtttataacgccgctcaacattggccattactccttcaaatggttgaacggtatcattaacgccaaagtcaccagttacatggaatttcaccggcttagttgagccatgcagaataatgtcgcgttgacgtttagttagtttattaaaaggcttatccatcggaatttttaatgccgtgcaagcttgttccaacatttcagtatagtaattggaagtcttccatggagccagtgcaccttcagctaaagattttgttttgtccggaacaaccaaatcttcgtctactgctaacttcatccctaacccatcacaatcaaggcaggcaccaaatggtgcattaaaggagaacagtcttggttccatttcacccacagtaaagccacactttggacaagcataatactcagaaaagttaagcatttcaccaccaattacatcaacattcatgtagccatctgacaaacgaagtgcagcttcaatagaatcaaataagcgagacttaatgctatccttaacaatcaaacggtcaacgacaatatcgattgagtgacgcttgttcttagctaattcaaaatcctcaccaatttcgtgcatctcaccatcaacaattacacgaacatatcctgcacgttgcactcgcttaaatacttccttgtgttctccacgcttagcacgaataactggcgctaaaatttgaattttcgttctttctggtaaagccatcactcggtcaaccatctgatcaactgattgtcgttgaatcagcgtcccatcattaggacaaattggatggcctactctggcccaaagcaaacgtaaataatcattaatctcagtgacggtcccaactgttgaccgtggattatgtgacgttgttttttgatcaattgaaattgctggatttaaaccatcaattgaatccacatctggtttatccatttgccccaaaaactgtctagcataactagaaagtgattgcacataacgtctacgcccttctgcataaagcgtatcaaaggctaaagaacttttacctgaaccagataagccagtaataactactaacttatccttaggaatagttaaattaatgtcttttaaattatgttcacgtgctccgcgaataacgatcttatcatttgccattaaaattctttccttttcttgatgatttttgcaattccataattgcatcccgcaagttagcagcttcttcaaagtcaagcttcttagctgcttcttgcatttgctcttgcaagttgctaatcattgtcttcttttgcttagccgtcaattcatcaaaattaagatctgcaaaactatcagatttttcttctttttcactcgacggtttagtaatcgaaattacgtcttgaatcggcttaatgattgtcttaggcgttatgccatgctctttgttaaattccatctgaattttacgccgacgcttggtagctttaatcgctgctctcatggaatcagtaatcgtatcagcatacatgattacttcaccattggcattacgggcggtccgtcccatagtctgaaccagcggccgatatgctctcaagaagccttccttatctgcatccagaattgctaccagtgaaacttccggtacatcgattccttcccgcaacaggttaattccaattaagacatcgaacttacctaaccgtaagtcacgcaaaatttgcattctttccagcgtcttaatatcagagtgcaaataacgtactttaattcctaagtccttcaaataatcggttaagtcttccgccatttttttggtcaaagtagtaacaaagactcgttcatgacggtcaatccgtttattaatttcgccaactaaatcatcaatttgaccctcaattggccttacttcaatcttgggatcaagcaatccggttggtcgaataatttgttcaaccttatgatctgttcgttcaagttcataatcacctggggtagctgagacatacaaaatttgattaacatgcttttcaaattcggatagctttaatggacggttatcaagtgcagatggcaaacggaaaccatagtcaatcaaggtttgcttacgattacggtcaccattgtacattgctctaatttcaggcatagtagcatgtgattcgtcaattaaaattaagaaatcatctgggaagaagtccaacaaagtatacggtggctctcctgcttttcgtccttccatatgccttgaatagttttcgattccgttggtatagccaacttcacccatcatttccatatcataggtagtacgttgcttgattctttcagcttcaagcaatttgccttcgccttcgaactttttaacctgcaatttcatctctttagaaattgctcccaaagctcgccgcaattgctcgtcattggtcataaagtgcgtagctgggaaaagcgaaatactctcacgctcaccgatcacctcaccggttaacgaatcaacttcaacaatgcgatcaatttcatcaccaaagaattcaattcgataagcatgattagaattgccggctggaaagacctcaactacatccccgcggacccgaaaacgaccgcgttgaaagtcaatatcattacgatcatattgaatatttaccaaatcacgcaacaaggtattacggtcatattcttcgccttcatggatcatcaagacactgcgcgcatactctttaggatcacccaaaccatagatacaagaaaccgaagcaacaactactacgtcattacgctccattaaagctgaggtagtagcatgccgcaactgatcaatttcatcattgattgccgaatccttttcaatataagtgtctgattgtggaacgtaagcttctggctgataataatcatagtatgaaacaaaatattcaactgcattattaggaaagaaacttttaaactcaccatatagctgccctaccaaggtcttattatgcgtaataactaatgtaggcttattcagcttagcaataatattggccatggtgaaagttttcccagtaccagttgcaccttccagaatctgttctttatatccttttttaaatccagcagtcagtttatcaatagcttgctcttgatcaccggctggtttaaactttgatactaattcaaatttgcgatttttttgtcgtttaatcataaaaaactcctcaagaaaaaagttggacaagcatagtccaactttttaattagtatctatattttactaccgcgaacgtgctttcgcacgaaaaatgcttaattatttaagtaaatctgctaaagccttttgataatcttcagctgccttttctgcagtggcaatgtcttttttgtttacaccaacataggccttaattactggttcagtacctgatgggcgaagtgctacccaggtttcatcatctaagaagtacttcaacacattagattctgggaacccttctaatggtgtctttttgccattttcaatagtttctttttgcaagaaatcttgaatcttaagcactttactaccgccgatttcagttaagtgctcattacgcaacttgctcattaattcggccatcttcttttgaccaccaatacctggcatttcaattgcacgggtaatttcataagcaacgccatacttttgccaaatttcttgcaaaccatcaaagacagtcatcccacgtgaagcatagtatgaagcaacttcggcaaacatcaatgcaccctgcatggcatccttatcacgagcaaatggtttaaacaaatagccatagctttcttcaaagcccatcaagaacttagcatcaccagctttattcatccggtcaacttcttcaccaatgtacttaaagcccgtcaaaacatgcttagtcttaataccaaagtcctctgcaatcttaaatggcaaagcactagaaacaactgaagtaacgatctcataatcaggggttaattgaccattttccttcatatgagccaataggtagtaagccatcaaagtagcaatttggttaccagtcaaaacttggaaatcaccatcagtttttctaactgctgcacccattctatcagcatccgggtcagtagcaataatgacattagcatttacctcatttgccaacttaaaaccaggttcaaaaacatcacggtattctggattaggcttaattgtggttggaaattctggatcaatgattgattgacttggcacaggaatcacattatcaaagccgccttgtctgaaagcacgatcataaagcatcttgcctgtaccatgaagtggagtataaatgatctttaacttgtcagcgttggccttaaccatctctggatcaacagttacttgcttcaattcattcaagtaatcttcatcaacatcttcacctattaactgcaaggtgccattagcacgcaattcttttactggtgcagccttgacagcaaaaatatcagttactttttgagcataagcaaaaagtcgatctgcattatctggtgccatttgtgcaccatcttcaccgtaaactttatagccattgtattgcttagcattgtgtgaagcagtgatattaattccagcgaaagtatgcaaatgacgtactgcatatgaaagttctggtgtcggtcttaaatcatcaaataagtaaacatgaattccgtgtgcacctaaaactctggcagcatgttctgcaaactctcttgagtgatatcttgaatcaaaggaaatagctaccccacgctttttagcatcagcaccattttcttcaattaaacgagctaagccttcagttactcgacctacagtaaacaagttaatccggttggtaccgggttcaagacgaccacgcatccccgcagtaccaaaattaatatcctgtccaaaggcatcttcgatccatttttcatccttgcccaaagtatttaattgatcttttaaataatctggtaaattagtagctttttgccattctgtataaatttctttagcgtccatcaatgtcctctattcattaaaagttggatttctaaagcgctttcaaactgttaacaattttctattatctgctattaattataaaacttattagtcattaatttaagctttagacaaaaaaagacatgtccaatacgaacatgtcttaatgaaaaaacgaataaatttaatttttcttgtcttgtaagtcttggtagtaattatatgcagcttgaccagctacactaccttcaccaactgcattagcaatttggcgtaaatctttttgacgaacatcacctaaagcaaagataccaggcaccttagtttccatatgatcatcagttacaatccaaccatggtcatccaagataccaagatccttaaaaggttcagtttgtggtaaaacacccacgtaaataaagacaccagcaactggaatttctttttcggcaccagtttccttatcgcggtacttaacccctgtgactttcatgtcatcgcctaagatttcttcagtttgtgcattccaaatgaaatgcatcttcttgtttgcaaatgcacgcttttgcaaagttggttgtgctcgcaattgatcacggcggtgaataactgtaacgctcttagctaattgtgaaagataaattccttcttcaattgctgaatcaccaccaccgatgacagctacatcttcatctttaaagaaagcggcatcgcagacggcacaatatgaaacacctttgcctgaatattcttcttctccaggcacattcaaatgcttatgatctgaacctgtagcaataattacgatcggtgcacgatactcattgccatcatcagttttaactaacttatcctcgccatcgagttcaacactttgtacgttgccatacttataatctggttcaaacttcatcattgtgtcgtacatcttttgactaagttctggacctttgatttcagaaaaaccaggataattgtcgatagcatcagtattgttcatttgaccgccatagggaccgcgatcaagaacaagaatctttaagttagcacgcgcagcatataagccagcagtcatcccaccaggacctgcaccaataataattacgtcgtatttatcagccataatctatccttctttctacttacttttgataagcaaataatacaatagatttaacttcttgccaactattttgcttatcttttataaacgaatttcaggctttggttctctacccatcattttcttaatttctgtatcaacatcagcatcttcataaagaacacggtagattgcctctgaaattggcatatcaatgcccttttcttcacataattcgtgaacagctttaacagtagtagcgccttcgacaacttgtcccatatttttcaaaacgtaatctaaagtcttgccttcgccgatttgtttaccagcacgccaattacgtgagtttactgaagtacaagttacaattaagtcaccaatacctgacaagcctgagaaggtcattggcttagcaccaaagtattgcacacccaaacgagtgatttctgctaaacctctagtcatcaaggcagctttggcgtcatcaccatatccttggcctactaaaatacctgcagcaatcgcaattacgttcttaacggcaccaccaacttctacacctactaaatcatcgttagtgtagaaacgaacgtagtcattggagaacaattcttgtacccgcttagcattttcttcattagttgatgcacatgcaatcgcggttaaatctttttgagcaacattttctgcgtgactaggacctgaaattgcaacaatcttatcttcatcatctggataaatttcttcagttaaaatttcagaaataagcttcttactgcctggttcaatccctttagttgcagtaactaacagtggcttagcacccgtcttatctaaaaccttgcgtacgtttttagcaacgattctaactgccttagttggcaaaacaaataaaacaagttctgccccatcaagagctgcttccaaatcaccagtagccttggtattctcatttaatttccaatccttcatatagtggctattggtgtggtgagcgttaatttcttcattaacactatcaatgttaccgtaaagagttacatcgttaccattatcggctaacattgaacccaatactgaaccccatgaaccattacctaaaactgcaatctttgtcattttttctctcaaactttctaattaaaatcttttattaattctaatctcttgaatacgggtattttaatccactaccatccaaataccattttggattaacgactttccgccgataaatccataaaataattgtagcaataaagaggattaaacttaatgcctgtgatactcgtattataccaaaaatatacagactatctgtcctcattccttcaacgaagaaccttactacactataccaaagaagataggtcatgaaaacttctccctgcttgaagagatgttttttatgacgcaaggatagaattaagattaagccaatcaaattaaaaaatgattcgtacaaaaaagttggttgataatacgtcccgcctattttcatttgctcaataataaattgtggtaagtgtaagctttgtaaaaaatgaagagtagttggtgcgccgtgcgcctcttgattaacaaaattaccccagcgtccccaaatctgagctgccatgactccaggagcaatgatatccagcattaaaaatggaggtagcattcgtttataacagaaaatcaacagcacaattaagccggcaattaaaccaccataaatcgcaatcccaccattccaaatcgcaataatttgctcgggatgctgtgaataataaccccattcaaaaatcacataataaatacgtgcgccaacataccctaacggtactgcccacaatagcaaatcgacaaaatcatctggaataatttgacgtttttttccttcgttaatcgccatccagcaagctaacataatggctactgccataatgatgccataccatttgacacttaaattccctaaatgaaaggccaccggattaattactaaattagtcattatgcggcaccttattcgtatcttcttttgagtgctctgaaatcagactagtcaaattattatcaaaagtttgagttgcatcatagcccatcttcttagctctgaagttcatcgctgcaacttcaataataatttcaatattgcgtccaaccttaactggaatattaacctgtggaattggtacattgcagatttcacgcgtattttcttgaaaacctaggcgatcataattagcttttggatcccaattaaccaaattaattaccagttggatttctgttctattttttacggcaccggcaccaaataaattcatcacatcaataatgccaattcctctgatctccattaagtgctttaagatctttggtgcttcacccacaacggtattatggtctttttgaaaagcatctactcgatcatccgcaattaatctgtgtcctctttgaactaatcccaaagcagtttcagacttaccaacaccagatgcaccagttaacagcacacccatccctttgatttcaaccaaaacaccatgaatgctggttcttttggctaaacgagcacgcaagtattcagttaaaatactggatatgtaggtagttgactctcttgtacgcaaaattgggattttgtgttcctctgctgccgtagttaattcttccggtacaggcaaagagcgagaaatcaaaaaacacggtgtagccttagtacacattttgttaaagacatgcattctaatatcatggtccaagcgtgccgcatatgaaatttctgtccgacccaataattgaattcgttgcgcaggataaaaatcaaaataaccagttaattctaatccagggcgataaatatcagaaacataaatttcttcatctttgatatattcctgtccttggtaaacttcaaggatactctgattgtcctggatcaatttgcttaatctaacttcatcagccatattaggcctcctaactatttatcaatatctttagtggtgacatttctagctttttttcttggtctaggaccagaagtactagtagccttaaaccactcacgataacttccactacttggcatattatcttgatttttccttccagtaaaccgataaataagccaaatgattaaaatcgcaattacagctactggtaaaagtaaaataaatgccttaaatagaacaaacaataaacttaaaataattagcgctactaaaacaagcgttacaatttccattaaactcattttttaacctaatctggattctcttgactaagcaaccactgtaaataggaataaataaacggttgcaattttccgtccattactccttgagcgtcagctgtttcatgacctgtccgcaaatctttcactaggttgtaaggatggaaaacatatgacctaatttgtgatccccagccaatctccttttgatcgcctttcagagcctgcttttgcttacgctttttttcttcttctaagtgaaaaagctttgctcttaattcattcatcgcagtttcacggttttgcaattgtgaacgctgtgcctgagacgtagtcacaattcctgttggtaagtgcgtaattctaacggcactagaagttttattaatatgctgcccaccagcaccactagagcggtaaacatcaacccgtaaatccttaggatcaatatcaatttgaatactgtcatcaacttctggaatcacttctacagaagcaaatgatgtatgccgtcttttagccgcatcaaatggcgaaattctaaccaaacgatggacaccattttctgatttaagcattccgtaagcatttttacctacaattcgcgcactaacgctcttcaacccagcttcttcaccaggctcataatcgttgatttcaaatttaaaaccagctgtatcacaataacgttgatacattcttagaagcatctgtccccagtccatcgcttctgtaccgccagcaccagggtgaatttccatcaaagcattatggctatcatacttacccgacaagagcaggtctaactcataattatgaaaatcttcttgcagcgtagctagatccgcttcaacttctttttgcaagtcaggatctggttcttcacgcaaaagttcaaccgcagtagtttcgtcttcgtagctagtttgcaattttaaaaatgaatcacgtttttcctttaatcggttggtttcactaattaatttttgcgctttttcctggttattccaaaaatcaggctgcgccatcttgttttcattaatttcgatgctttcatcaatcgcatctaagtcaaagagaccccctaaagtgatttagacgtttttttagttcatctaacacactttgaatttcactaatttccatttttacctaccatcttttattttattgcaaaaaaagggaagctcttaactcccctttttctttattaacgactaagattttgtctaatttcagccttcatgaacaaacgagttacatcaaattcaatatttgaaatcatttcttcaaacattctgtaaccagaatcttgatattcaactaatgggttcaattgaccgtatccacgaagaccaattgattgacgcaactgatccattgcatcaatatgatcagtccaacgatcatcaaccacacgcaagataactaccttttcaaattcaagcatttggctaggatcgcctaaggccttttccttatcttcgaagttttgctcaacaatgtcataaagcttcttcttcaaatcttcaacactaatagtcttgaagtcaattgagtcagttaccttgtctgaagtcaaacttgaggaaatgaaatcgcgtaatgagtcaagacgccattccttgcgttcaccttgagtaaacattgctacttggtgatcaattgttctgtgaatcattggaattaaaacattcttcaatgacttatcagcttcaatgacctgcattctttcgccgtagataatttcacgttgaatacgcataacatcatcgtattgcaaagtttgcttacgagtatcatagttattaccttcaacacgtttttgagcagattcaacttggcgagtaatcaagcgactttcgataaccttatcatcatcattatctgataaacgatccaagaagtccttaactcgatcaccaccaaaacgcttcatcaaatcatcttcaagcgacaagtagaatctggtgtaacctgggtcaccctgacgaccagaacgaccacgaagctggttatcaatacgacgtgattcgtgacgttcagtaccaataactgccagtccaccaagttctttaacaccaggcccaagcttaatatcagtaccacgaccggccatgttagtagcgatagttacggcaccacgttgaccagcgttcatgatgatttgagcttccttagcgtggttcttagcgttcaaaactgcgtgaggaatacctgctttatcaagcatcttactcaaacgttctgaactttcaatggcaacagtaccaaccaaaacaggttgaccattagcgtgacgcttcttaatttcttcaactacagcgtggaacttagagtccaaagttggatacaaaatgtctggcatgtcttttctggcaattggacggttagtaggaatcgtgattacctgcatgttgtaaatttcacggaattcttcctcttcagtcttagcagtaccagtcatacctgacaacttcttgtacattctgaagaagttctggtaggtaatagtagcttgcgttcttgattcttcttgaatcttaacgccttccttagcttcaatagcttggtgcaagccatctgagtaacgacggccttccattacacgaccagtgaatgagtcaacgatcaaaacttcgccatcttgaacaacgtagtcgatatccttaagcatgatgtagttggcacgaagagcttggtcaatgtggtgaaccaacttttggttttcaacatcgtacaagttctttaggccaaagtgttgacaagccttttcaataccagttctggtaagtgaaatagtcttagttggccagtcaatcttgtaatcgccgtgatcttcatcatcgtcggcatcatcatcgctcttgtcttcagtcaaagtcttaacaaagcggtcagcacggatgtaatcactgtttgcttgttcagcttcaccagaaataatcaaaggagttctagcttcatcgattaagatagagtcaacttcgtcgatgatagcgtagttcaatggacgttgtaccatttgttccttgtaaacaaccatgttgtcacgcaaatagtcaaagccaagttctgagttagttgagtaagtaacatcacagttgtaagctgcacgcttttcgtctggtgacattgagttcaagttcaaaccaacagttaagccaagccacttgtaaagttgacccatttcttcttcgtcacgacttgaaaggtattcgttaacagtaacaacgtgtacacccttgccttcaagtgcgttcaagtatactggcatggttgctgtcaaagtcttaccttcaccagtcatcatttcggcgatgttaccgtagtgaagtgcaataccacccaaaatttgtacgtggaatgggtaaagtcctaatacacgcttagcaccttcacgagcaactgcgaatgcttctggtaaaagatcatccaaactttcgcccttctttaaacggtcacgaaattctggtgtctttgcttgcaattgttcatcagatagcttgctcatttcatctgcatgagcttctaccttagctgcgattttttcaaatttcttaagttctcttttatcgtcgttatatagtttctttaaaatatttaccattaaatcggtccttatatgtcgtaaagtctaaaaatacagaataattttaacatgtttatcagcaaaataaaaatattctaaacaaaaaaccccacgctcaaacaaacgcgaggttttgaattaacgagtattttaactcaattattcgttagtttcaattaagccgtaacgaccatcgtttctacggtaaacaacgctagtgccgttagtttctgcatcttcaaaaacgaagaagtcatgttccaacatgtccatttgtaaaatagcttcttctggatccattggctttaagcttacacgcttgttacgaacaatatcaaattcgctaggcttcttttcttcttcttcaggttgttctacaaagaaatcttgtaatcccttttcacgactctttctatttacacgagtcttgtactttctaatttgacgttcgagtttttcagaaacgaagtcaatgctacgatacatatcatccgtggtttcttcggctctcaaaactaagtatggtaaaggaatagtaacttcaactttagctgagtgatcacggtatactctcaagtttacgtgtgcaatcacatcttgattcaattcgaagtacttctctaacttgtttaaccgcttttctacataacttctcaaagcatcagttacttcaatattttctccacgaacattgtactttaacatataagattctcctttcaccgctatgcggtttttctttacaaatttattataccaaaaaatgtaagcgtttcataacaaatctaatgacaaattgaaaagctttcaattttcatttcgggaaaaccctgctgtaaacggtcccgcgcgtgatatagcgtgcgcccggtcgtgtaaatatcatccaaaattaatacttttcctgaaactatattttccttgattttaatatttttatcaatcaaaaagctttgaggcgttttaagccgctcctctttgtttttctcaccttgggcatgactacccgattgtttaatcagaagcggtgtcagcggcaaaatatcagcataaatagcaaaaattgtatcaaactgtcgtcttgattgatgttcaggtgaagtgggcacgggcacataaaagtcatagttagttttacacaaatagtcataacacaaatcttgcaatacttcccgcaaaacataatctccacgccgcttatacgcaaccatcaagtcatgaaaagcagaattataacgatataaagcatgattatgcagaatattttcgccataaatggcttgccaatttcgacaatcgctacacataaagccttgacctagttccttatcacagccagagcagcgattgtctgctaacttttcaaattgttttaaacattgcaagcaaattttactttttcgcgctgttttaaaagaaaaaagttgtgcaaattgtaccggtggagtaaactcctgctcacataataaacaagttctcatctattcatccccttgatctgcttaatactctgtcgaatattcttggtataacgatgataacaatacaaaactaagcccgtttggtcatcgtgagcccgaccaactcgacctgcaatttgcaccaaactagcagcggtataaattgcatcatctgctgcaataataattacccaaacatttttaaaagttacaccacgctctaaaattgtggttgtcaacaataagtcatatttacgatcacgaaaagcctgtactttttctaatcgttgcggatcttgtgcatgaacaccggccaatttaattttattttgcaactttttccgcaaagcttcttgataaagcggaatttcttcaatccgtggtacaaacaaaagcaaaggatgaccactttgaatgacttttttaatctcctgcattaatttaggatgaatttgtcccttccgcaaaaacggcctgataaaaagcctttctcttggtacaggcaataatccaccatgaaaacgccgatttaagcgcaaaatttctaacttccctgttttagcttccaaaagcaaatcgttcgttggcgttgcggttaaatacattcgagtcccagttgttttaaccgcatttttggccgcaaaatgtagttgcggattacctacataaggaaaagagtctacctcatcaattaccaataaatcaaaggcacgataaaacttcattaattggtgtgtagtacaaattgtcaactgctctagccctatttccttaaattcacggccatgatacttaccgatctcaacttgggcaaacgctgccgaaaatcttggaaacagctcatttaccacatcaattcttggtgtagcaatacaagcgcgctgtccttttttcatacatcgagcaatcaactgaaacaacatctcagttttacccgccccagttacagcatgaaccaatgtattttttctttgttcaaaattttgtactaatttatccgaaatattctgctgcaatggggttagtttaccttgccagcttaatcccccgtttttaacatgagaaaaagtattattactgtcttttctaataagccaatcgccctcatttgcacgtcccaagccaatacaaccacgacaataatatttaccattaggcagtcgactattaacttggctgccacagcgattgcatttacctttttcaattactggaattttacggcatccctcaaatgtgctagaatcctcttgactaacaatccattgacgacctgataatagagtcaaatcttccatatttttacctccctattatctattacgcaaaaagaggcgattattttgtcagaaaaggaaaattttttaactattaaagaaaacggcaccggtgaattaattatcaaaaagagcagattcattgccaatattgcccgcaccactactactgatgcggcaaatgattttattcaaaaaatctctaaaaaatatcgcgatgcttcgcacaatacctttgcctacacgatcggcttaaatgacgaccaggtcaaagaaagcgataatggtgagccatcaggtacggctggtgttcctgaattaaaagcattgcaattaatgaatttaaaaaacgttacagtcgtagtaacccgttattttggtggaatcaaattaggagcaggcggtttaattcgtgcctattccaatagtgtcaccaatgttgttgaaaaagtcggcgtcattaaacgcgttttacaacaagaattaatttttagcgtaccctataaccgcttcgatgaagttgatcattacctaaaacagcaaaaaatttttattgccaataccgaatacggtgtggatgttaaaattcatatttttgttaacgatgaccaacaagctaaacctaaggaagacctaactaatttattggccggacaggttacctttactaatggtgaaaaacgctataatgaaattcctgttgaagctaataattatcatgaacaataaaaagagcatttggatatttccaaatgcttttttgctacttattattttttttactcttcaattgatctggtttttcgtctcctaagtgccaaacttcaattgttggatcagttttactcttttgattaataattttctgaattacatgcatcaaaggatggtatttttcacccaataaaccaattgattccacaaaatactctaaggcaatcagcaagcctaagatcagaagccaagtgccccaagttggcgaaagcaggaataataaagaaataaatgagaaaaccaatgataatgcgtaaatagtcaataccgtctgtcggtgcgttaaccccattcgcatcagctggtgatgtaaatgatgcttgtctgcttctgaaattggctttttgtttagctttctccgaatcattgcataaacggtgtcagtaataggcactcccaaaatgataattgggaccaacaatgaaataaaagttacattctttaaccccttcagagataaaacggcgatcataaaaccaatataaagtgcacccgtatcacccaagaaaatttttgctggatggaaattatatggtaaaaagcccaataaacaggcagctaacataaaacaagcaattgggacatatagctgatgagtgtgcaagaagaaataacctacgatccccatggtagtcagagagatcattgaaaccccatcagctagcccatcaagtccatcaatcaagttaactgcattagttaaagctaagatccaaaaaatagtaattgggaaactccaccaacctagatttacttcatgtgcgatgaatggcacctttaacacattcattctgattccagctaaaaagtagataatcaatgaagcgataaaaatcccaaacattttttgtctaggttttaactccaaaatatcgtcgatcaatcccgtcaaaacaattacgcttgaagcgagtaaaatcgaaaaaatttcatgagtcggaaattgctcacgcaacagaacaaaagtaccgatattaaaagtaacaaaaatccccagtccaccaatcgttggcattggtttcttattaactcgccgggcattaggattatcaacagctcctaagacaaaggcaagccgtcgaataaacggtgtaattgccgctgaaataattactaataagaataattcaacaataattttaaacatatttggctactttccttatttacttgttctaattatacaagtagtcagtattttgcacaaatagcaaaaaagtttggaaaaattatcttccaaactttttaatttatttagcgatcgccacaactcttttttcacggataacggtaatcttaatattacctggataatcaagttctttttcaacctgattacgaatatcacgtgccaaaataactgtccgatcatctgaaatttcgtcaggttcaaccatcacacgaacttcacgtcccgcttgaattgcataagcctgcttaacgccttggtagctcttagcaatcttttccaattcggtcaaacgtctaatataattttccaaactctcgcttcttgcaccaggacgagcactagaaatcgtatctgctgcaacaacaagttcagcaataaacgacaacttaggcacatcgccgtggtgtgcagcaatcgcatttactacaacatctggttcatgatatttacgagttagttcaaccccaatttctacatgggaaccttcaatatcatgatcgatggctttaccaatatcgtgtaataaccccgcgcgaactgctaatttttcatccaagcctaattctgcagccatcgtgcctgctagcttaccaacttcaattgaatgtgacaaaacattttgtccataagaagtacgatatttaagacgacctagcgtcttaactaattcaggattcatccggtgaattcccagctccatcaaagcactttcacctgcttcatagatgtcatcgttaacttcttttctggccttatcgaccatttcttcaattctagctgggtgaatgcggccatccttgattaagcgttccatcgctcttttggcaatttcacgtctaattggatcaaaaccactcaaggtaacaacctttggcgtatcatcaataattagatctattccagtcaaagcttcaaatgaacggatattgcgtccttcacgaccaataatccgtcccttcatctcttcatttggtagatcaacaacagatacagttgtttcggcaactgtatctgccgcgctactttgaatagcatccacaatgacctgattagcataatgatcagctttagcttttacttcttcgttactatttctgatcatctcggctcgttctttgactagttcatcagataattgactaagcacaatcttcttggcttcttcctcatccaacttagctacgtcataaagcttttgccgtctagtttctactaattcttcagcctcagttaattttgcctttaagctagcatactgctgctttaattggtcttccttttgcgtgagtccactttcacgttcatctaataaagaattcttatgatctaaggtatcttcacgttgttgtaaacgatttttctcccgagctaaattatctttcttggaatttaactcatcctcggtcttttgcctaaaatcacgaatttgttcttgagcttcaagaattttttcttttttagtattttctgcactttgcttaacagccgctgctgcttgcttttgtgcattaacttcagcttgtgctgcagcaacctgtgccttagcatcagctaaaatgtggtcagcatcattctgggcattttgagctttttgttcccaagaatgcttgcgaattgcataaccaaccactgaacccaccaagaatgaaacaatggcagttgcgacgggaatcataattgttaacatattattcatgattactatcgccttttttagaattattcacacaacttttatgataaagaacctatctgttcatgtcaattaaatcaaaaaaccttggaaaataaatccagggtttttgacataattatttagcttgttcagactttttatctgtagcagcttctttttctgtcttggcttcttcgcgcttctccttgatcttttctggatcttcacgatcagcaattgacttttcatcaatcccgtaagcttgacgcacttgcttttggatatcttgataaatatctggatgctcttctagatacttcttagcattctcacgtccctgaccaattcgatcactcttgtaagagtaccaagaacctgctttatcgataatgtccttatcagcagccatgtccagtaattcaccactttgtgaaattcccttaccgtacataatgtctacttctgccaccttaaatggtggagcaaccttgttcttaacaactttaattttaactctgttaccaagaacatctcctgattgcttaatctgttcagctcttcttacttccaatctaatagttgagtaaaacttaagagcacgaccacctggggtagtttcaggattaccaaacattaccccaactttttcacgaatctggttaataaagatggcaatagttttggttttagaaatattacctgataacttacgcaaagcttgactcattaatctcgcttgtaaaccaacatgggcatctcccatctcgccttcaatttctgctcgtggtactaaggcagcaacagagtcgactactacaatgtcaattgccccactggaaatcaaagtatcagcgatttgcaaaccttcttcaccagtattaggttgtgacaaaattagtgaatcaatatctacacctaaagcttcagcgtaagcaggatccattgcattttcggcatcaatatatgctgcagtaccaccacgcttttgcacctcagctacagcatgaagggctaccgtagtcttaccagatgattctgggccataaacttcaataatacgaccacgaggatatccacctacaccgatagcagcatctaaagctaatgaacctgttggcactgttgaaatttgcgtatcagctttttcgcccatccgcattacagcacccttaccgaaattcttttcgatttttttaagcactgcatctaaagcagcctgtttttcgtctttggccattaatgtcctcctatttttcgtacctaataattatactttgaccgccgtccaatttgcaagagaaatgcaaacgaacgttcaaaggattttttaccctctattatttattacgctaaaaatcgccattatttttttacaaaataaaaaaagaagcaaatgcttctttttaatcattcttgacttaatactattttacattgagcccttgaatacgccccatgattggtggaagtaatcgtaacctgagtaaatagtaaagatcaacgcaaggtaaagtaagatagtaccaatgtggaagaagtcaccaatcaataagaaaatgattgataacatttggcaagtagtcttaattttaccaggcatctttgctgctaaaacttgtccttcattttctgctaagatcaaacgcaaaccagtaacagccaattcacgacaaacgatgatagctactacccatgctggagcaagtttcaattcaactaagaaaatgaaagcagtcatagttaacatcttatcagctaatggatcagcaaacttaccaaaattggttaccatattacgtgaacgcgcaatgtgaccgtcaaaccaatcagtagccgaagcaacagcaaaaacgatagcagcaataacacgactccaaacaacagttgagcctgctgcttgaacactagcattcccaccaaaaatgatgattaacataaatactggaatcaaaaagattctaaaaacagtaagtttattaggtaaattcattctaacactcctagattttaattgttgttattatttccaccatcattgccattgttagtgtctgctgatgattgagtagtagatgattgttgagtttgactactttgttgggtttgttggctactttgagtagtagtagatgattgttgacgactgctttgacgagtagcactgctttgagtagttgtacggctttgggtagaactactattggttgtattgttattagtagagcccgtattattagaactactattattttgactagtagttcccttagccttaccaatcaacaaagtaattgtcctgtacgcattgtttgctgtatatgggattttcttacctgcaatagtgattgaagtaccattatcgttgcctaaagtaatcactactctctctgcattgcttggcaaagtcatagtgtgcttttgattagcaagtaaagttgattgccagctattagcattaccattgacttgtacacccgctgaaatattttggttttcaccagcacgcacaactaggcgacggtttttattcaagccagtaactcggtactcattgtcactaaccttagtaaccttaactttattgactactacttttttagctttcttagaagatgacgatgatgacttttgtgatgaaacagttacatcattattatcagcttggttcttttgaccacctgaagaaagacgagcatacaaaacgtacactacaagaattacgataattacaccaagtccgatcgcaattcgtggcaagtaattcttccacaaatttttcttattgtcggtggtttctcgtacttcttcactcttattatcaatcgagttttctacgtactcatctggcttagcttctggtacatcatcgtggtaatcacttaataactccttaccatccaagccaacaacttgtgcatattgacgaataaatgctctaacataaaaatcgcctggaagtttatcaaattcattcttctcaatcgcttcaagatatctgctctgaattttagtagctttttcaatatctgcaattgaaagtcccttagcctctctggcgctctttaatttatctccgatatctgccatatttacctcttcaaattttaatttatcatgttgagtataccataaaattctcattacaacgtcttagttataaaagccatccacctgtaacataaattgtctgtcctgttaaataactactacgtcgatctagcagtgttctaacccagtatgaaatatcactgccattggcccaacgaccaactgggatttcatcttttacctcttgaatcgtatcctcagaaaagaatgcattcattttggttttaaccgcaccaggcgcaattacattaaccgttaagttattggaagcaacttcacgcgcataagcctgagcgaacctggttataccacctttagttgcactatagacgctttctaatgcactacctgcaccaccatagactgagcctaaataaactatacgactaaaatctcgtttcatcagttgtggctctaacaatttagttaacttaattggcacagtaagattaatattaatcagatcagtgatatttgctaatttttcatcacctaaaaaaccatacttagtaattccttgagcaaaaactactgcattaactggcaacaagtttttaacaaaatctgttaactgtgcatcccctgtcgcaaaatccaactgtagcgacataaaatcctggtcaggatgcttagcaaacagctcttgaactaaattttcagctttttgagaattagaatgataatgcaagtataatgaccaaccggcatctgccaaatctcgacaaatatcttgaccaataccgccagttgcaccaaagacaattgctcgcttcaactttatcaaccccttacttgttttctaagtaagcagaacaaagttcactgtctttcataatcttttggcagtagtcataaaactgatcaaaattcatcgcctgcaatttagctatattttgtgttaaattttcatgatctaaattttcttcaattaattcaattgccaaataagacagatcattacttgtcctagcagtgcgtgctaaccattctttcttttgcaaaatgaagttttgtctaataaaacggtattccgctgaatttttcttaattggttccgtcaataccctctttatttctgcaattacttcttgagcttgaggacttacaccaaaaatagtagcaaaatcgccctgcctggtgtaattaacagaaatctgcagcgaatccattaacaactgcttttttctcatttcttcaaaccatggtcccattgcacttagttttgattctaacattatttctaacagaatttgagtcaaatcaaagcttaataatactttcttaaagtttttaaagcgaattcctaaaccaaaggaattagaattacctctggctggcaagacttgatcatgtaacatgcgaaaactaacttgtttttcagctgtgcttttacctttcccgtgcaaatatttttgctgcagctttcctacttgccgcaaaatcgtttgcacttgattatcagaaaaatcaccgcaagcaacaaattgcatcttttctggcacatacttagcctcataaacttgggtcaagtttttcactgtaacttgattaattgattctttcgtacctacaacttcgatccctagattagaatcaccaaacatatcatgcataatcgcattatttacgctccaagttgggtcatcctgatacatggccaattcttgttcaataatcggagcctcttgcgcgatattttccttagtaaaatacggctgccctaccaattcaaacaagagatcgatcattttaggcgtatgctcaattccactacaataaaacattgtttcattaaaagacgtgaatgcattaacgtcagcaccaatatcttcaaattgcgttgacaaatcaccatcttttttggcaaatagcttatgctctaagaaatgagccgaaccggcaaccttttgtggatcactactaccaaagtcaacaattataccgaaaaatcgttgataaaaatgtggctttaaaataatttcggctttaaagcctgactgatattcttttttgataatttttggtgtcatcattttaaaacataactttcattaaagaataaattttgtgcgaaagctactaactgcttaggtgtagctctcctaattgcattttcacgatcaaagtctaaatatcccgagaacaattcatcacgcaacatttgacccatctgccagttttgaccgtctagaccaatcttcatattacgcaaaattgcctttttagcctttttaaataaatcatcttctacttcgccctgaactagtttacccatttcggataaaataatttttcgagccgctgcaatcttactaggatcaagtcctgcactgactaaaaacaaagaattattggcaaagcagcttgcttcaacattataagctgctcccaattgctcccgaatttgcgtaaataatttagatgattgatcacctgccaaatattgcgataataatattcccattacttgaccgcgataatcaatactttgttctaaaccaaagcccattaacaattgagcttgcacatttccttgatcatcctctttttcaatcaactttcttttagctggaatagttagactagctgtttgaaatgatttagttaaaccagtttgttgaaacatagcctgagctaatttagaaaccagattattatccctggtcattcctaaaatttgcattggtacattagctaaattacgccaataatgcatcatagtcgtgctagtcgcagctttgatttcatctagtgagccaataaatgtctccgcataatcaggttgatcctgataccacaatttaaaaaactgctccaacgcataattagatggttgttcaatcagttcttgatattcttctgctaattgacgtttagcatattccaccaaaggttccgcaaaattaggttgattaactatttgtgcaatcacattaagaatttcttcatacgtataatgtggatccaaaatctcaatcggctcaacaaaattggcataataagtcaaaagtatttctttaccaaaaacttgtggcataatctccagctgtaaatcatataattctgccaatcttttttgttgtaaagcaagtgacggataacttaagctgctattcatctgtattcgcgctagcaaactagcataagctaaattatgtttagtcagcggcaaacgcaaaaaacagccaatagcggctgttgtaaactttttattttttctaattgcaatattagttgtgagcattgtttgaattaccttcattctttattggtggcactaaaacttgtcgtggcttagagccttcagatggaccaacaatccctttagcttccatttcatcaacaattctagcagcacgattataaccaattctaaacctacgctgcaacattgacacgctggccgtctgttgacgtcgtactaaatcaacagcttgctcatagaattcatctgctggctcatcatctttactatcagcatttgatgaattttcaccttttttaggaatcattgtctcatcataactaacctcttgttgcttcttaacccattcaattacgcgttcaacttcatcactagcaatataagcaccttgaacacgttcaggtttagatgccccaattggcatataaagcatatcaccacgaccaagtaatttttctgcacctgtttgatccaaaatagtccttgaatccactccacttgatacagcaaaggaaattctcgatggtacatttgctttaatcaaaccagtaataacatcaacacttggacgctgagttgccaaaatcatatgaattccggcagcacgtgccatttgtcctaaacgaacaatcgcgccttcaacatcgtgaccaccaaccatcatcaaatcactaagttcgtcaactacaactagaatataaggtaacggcttcatcactggtttagttttatcacgattgttttcagcaactttttgattatattcactcatgtttcgcacgccaccagccgcaaatagcttatatctgcgctccatttctttaacaactttgcgcagtgcatttgcggctagcttagcatcggtcaccacagggatcaataaatgcggcacaccattataaactgaaagttcgaccatcttggggtcaattaaaactaatttaacttcttcaggccgcgccttcattaaaatactggctaaaattgtattaatcgctacggacttaccagaaccagttgaaccagcaatcaataggtgtggcatcttagctaagttggcagaaataatgcttccagttacatctttacccaatggtacatccatcggatcgcttttggctttattatcttgatgttccatcacgtctttgaatgaaacaacagacgttgctcggttaggtacctcaattccgataaagggcttaccaggaattggtgcttcaattcgaatatctttagccgcaagcgccaaagccaaatcatccgctaagtttacaattcgacttaccttaacgccaacagctggctggacttcataacgcgtaatagttggtcctaaaatagcttttttaataatcaccttaacgccaaaactcttaaacgttgattgcaaaacttgggtatttttcttaattaaatcacggtcagtactctgatcagtcgatttaattggatcaagtaagcttaaaggtggcatcttataagctttattgactggcgcatcagtttttagttcaccatgatcgacatcggctaattcctgctttaacttttgatcatcttccgcaaaagaatgtgacttaggtagttcctttaccccgtcatcatgttgtggtgcaatttgaatttgcggttctggatcaggtgtggtctctggctcaacttctacgtcttcagccgtcggcgttacatcgtcatcagttggatcggcagggtcaaagtctgctacattaggaaaaatcggtttatcgtcatcaactaaatcttcgtcttgttcctcttttttctgacgccgcttttccaaaacgtcattatatttatctttgacctttaccccagcttctttattctttttgatgaataattgactaactgtctggaatttttcgataattgttctaaatttaacatcaaaaaacatcaaaattccaattggcagcaataaaatagcaaaaacacggacaccgatttgccctagtagtggataaaaaagttgataagctaatgaaccaattaatccaccaccaatgctctcagtgactccagcacgaccaaactccgcggccattgcatgccaaaaagaattcaggaaattactgttaactaattcatgttcaaaatacaagttacattgaattaacagaattcccaaaaaagcgattgctaaccccaagctacgcttaattgttaagtgaatcggttgattatagattaaatttactaggccaaaaagtcccagtaaacctgccgcaaacaaataagaatccccgaagaacattcgaatcaaatttgcgatttgcttacccaaaataccgaaacggacaaaagccagccccgctattaaaatcaagactaaaccacaaatactccaattaagattttgctttttgtttgcttttcgcttattgtagctctttttggcctttctttgtttcttttttgcaggcatgtactcacctgattaattatcgaattcagccttgaagttcaagttaaccggctgacccaaagttaattgggttgtttcatagatcaaggtctcaagttgctcaactaatggtcgagttagtaactgccaatctgaattactaatgtcagagccatcaccatggtaatcttttaattgcacgatttgatgaatcaagccgcttgcttcaaacatagctggtgcaggaattacatcatattgaatagcaacatcatagtaactaccattttcttctgaatgctcatcgtcaccgctaacatctaattttctaattcctggtctaacgtcactaattggtttggtatcttcatcaactaaatcataatgaaatgcctgtacgataatatctgtctgtttttcaaaatccattatttattctcccctagattacgttcatatctttcaggacgatcatagtcatcttttaacttgtcattttcataatgatgggttgtttccatattaggaaaaccttgctggcgtaaagcttctagcaaaaccattgctacagaattagacaagttataacaccgaatgttatcagacattgggatacgtaaattacggtcatagtattcacgcataaaagtttctggcaaaccagttgtttctttaccaaaaacaaagtaataattcttgttaggatcagtataatcgacttgtgcataattttttgatgagaatttagaaattaaatacatctcatcattaggccctaaagtcttcaaaaaggcattcaagtcatcatgtctgcgtacatcgaccttatcccaataatcaagacctgctcgcttcatttttttattatcgatttgaaaaccaagtggttcaatcaaatcaaggacagtgttagtccccgcacaagtacgagcaatattgccagtattagctggcatcaatggttcatacaaaactacatgattagtcattcaaaaaactccttatcaaaaaaagcgtagcttttaagccacgctttaaaactatctagtatttattcgctttcgtcatgatctgcatcccccgtggtcgaagaaacagcattctcttcaaagagtttagactctcttcgataataattgtacacgcgagacacaataatcttcaagatcgcataaattggaataccgaaaactacaccccataagccccagacggcactagcaccaatcaagagtaaaattgttgtaattgggtgcatttccattttattccccattacccatgggctaagaattcttgattcaattgtttgttcaatagcaaaaacaattaagaccttaattaacattgaacctgaagtcataattgaaattacaattacaggaatcattgctaatggtgtaccaaagtatgggattaagttcataaacccagctaaaattgccaaagccacgccatatggtaaaccaattagaatgtaacccaatgagaacatcacacctacccaaaaggcaacagtaatttgaccacggacatatgaagcaacagcatagttaatatcatataataatttgctaaaactaggttgccatttttcaggtgcaaacttggtaatatatggccgcagttgatgaccatcttttaacatgaagaataaaataaacggtgcagttaacaaagtcatagccaccattgtaataatgctgacggcagatgaaatattgccgatagttgcattgatggtactttgtccagacttaaataaggtcttctgcgtattatcaatcatgcctttgatactgcctttaaatgaatgtaaacgcggatcttgcaacgcattttgtgttgcattaaccgcatcattccaaatatgaggccagttctttatcaatgaattaatctgattctgtgcaattggaaccaagatattaataatccaaattaatgcgacaactactagtaagaataaaactataattgtcaccactcgcggaatcttaaattttctttcacaccaatcaacaaccggattcatgatatagtactgaattaccgctaataataatggcggtaaaattgcactaaagaagatccaggcaggattcaatacaaaagatactttattaaagacccaaataattaaaaagaatagcaggacgtttaataaaacaatactaaaacgattatctaagaaccattttttaaaaacagttccacccctatgttggttattttccatctattcatcctaatttttaaatgtgttcataaacaatatcatcatcaaccttaaaattaggtaatggttgatcaatatccggatcaaagtagatcgcattagcaagtggcgtcttagaaacgggacggttaaagaacaaggttgcgtgtcccaatgccttcatgttgctctctaccatcggaccaacatagtttgcaacataggtttgaccatcaacagtgattgtatcgccttttttaaaaacaaaaccactaactggcgtctcagtactgaatttttgaatgacagaaacgtcttccaaatccttattagcaccctcgccaaataaaattaccatgccatctttattatcgacggcctttttaccaatttttttaatatttgcaatccatttcataatataatctctccttaaaaataattttagcataagaaaagctgcttaaaaacttaagcagcccaaaatcggcgattattttttgctcaacaggaaatcgtgtttttaagcgtctaatccgctttcatgctatactttattttagacttatttttatttagagatggaggcccacacatatgaaggttttaatcggaggttacaccaaaaaaacttccaaagggatttatgaattacctattaccagtgcagcaaatgatgcccgtttaggcaaagctgagaatattattagcgttggtggtccaacttatttccgaaaagatggtaatttaatttttactgttaataacgctggcgataaaggtggaatcagcgtctttcaattaagtgatcaaggcgcaaacgaagttgaccactatttaactccaggctcttcgccagcttatgtaggaattaaccgcaccaaaaagttgatttacactgctaactatcatactgctgtcttgtccgttttccgctacaacgacagtggcaagctcgatctagttgatactgtaactcacaaagctgaaacgttgggtccgcgtcctgaacaagttgacggtcctcaccctcacttctttgatgaaaccccagctggtaacttggttagttgtgatctaggcaatgataccgttgatttttatagattagaaaatgatcaattaaaacacattgctcaatataagtgcgaaactggctttggtacacgtcatatcgtcttcagtaaagatggcaattacttctacgttgtcggtgaactttctagtcaaatcaatgtcgttaaatttaacgaagacacttgggactttgaaaatattgctacttataagacaattcccgctgattttactgaccataacggagctgctgccttatatattagtcaagatggcaaatatgtttacacttccaacaggggacataattcaattgctgtcttcaaagttaacgacgatcatactttgagcctggttcaacgtgtatccacttttggtgacttccctcgtgattttaattgggataaagatcagcgctacgtcgttgtcgctaatcaaaatacagataatgctactctttacacaagaaacgctggtactggtagcctaactcctattcaaaaagaaatttccgtaccagaaggcactcgcgttcttttcaccaaatagtaattagcattagtaccaaagtcatggcgcaatagaacgtcatggcttttttattcctacaacttaaagtaaaatagaaataaatgaaacaaaatataagtcatgtggtaataagtcaaatgaaaggcgatgatatttgttctttttgatcataaatttgagtatatgaaactaagccttggtaaaggttgatttttttaatgttaaacttttgtttacttttaaatttagaccaatttttgaaattaagacctcggtgtcctgtacagtttgtcatctttgagcaatttaaagataactcgtactaattttcttgcagttaatgtgcaagcacgtttatgcggcgagtagacagcttcatcatacttcttttggtaatattttttgaaaacaggatcatgtaatcttgctagattggcagcttcaatcaagtaatatcttagatatctgtttccagtcctggccattggagtatgttcgttgctgtgatctcccgattgatattgattccaggttaggccggcatacttagccagctgttcttctttatcaaagcgatcgatacttccgatctcagcgataataccagctgtataggttttgccaataccgggaattgattccagaattttgctttctggtaatgcatcaacgatacgatcaattgctttttctagatctttaatagattcattaaagctttgaatcatgttgtaatgaacagaaagcactgcatcaattgaatcagtcattactttgcctaagcgatatgaacctctaacagctttcttaattgctttagccaaggtatctggatcggaaaagcgtcctctgcctttaacctgtaagtaagaaattaagtcttcggtaggcatatccgcgatctcatccagagttttactatcggttacaatagacatcattgtagcaccgaaaagaggagtattaatcttatctttatcgacagtgattagtttattaacccgataatataaagcttcaatgaagtgctgtttggtacgagtcagttcttgaactaattcatatctggtacgcgttaaacgctctaaagcaagatagttgtcttgtctggcaatgcttactcgataatgtccaaagcttagatacaaagcaatgtaataagcatcgagaggatcagttttactttcttcaaagactttatgaaacctgctggtttctttggggttaattacatcagtctctacattgagcttttgtaaatcttcgtcattttggaaaaagtaagcaggatgaaaactgtaaatagatgtagcttccatgccaataatgatttgatcatagtgtttattttgagctagatctaaaatttgttttttcagttcactagcaccataaagatcattgacaaagctatcgttaattaagcgtttgttttgatcttctgaatcaagtgcaacgacctgtaaatctttagaactaacatcaataccgacaaataatttcattggaaatggcctcctttctttcaaatttctgatcatagattttgatcttcacatgttaacccctaattacagttcttaagttcaatctcgccagtataagtattcactggttgcttctttgaaagctgcacctaatcccaattgctcaaggactagcaaaaagaagcaatcaatacagcatgtgagttagagcataaaggaactgtctgggtggcagacttataaagcagacaaaactgcaggaggtgataacctagaccagttgaccaaagccaatgacaattagaggctaacatgtgaagatcaaaaagcaaatactaatttgattaattatcacaatatgactaattacaatttatataatacgagaaggtgacaaagtgaaaagaaaaataattcgaatattacttttcattcttggcgggatattagggttactacttctgtataaactctatttaaattaccgtcctgaattgaatttattacttcattttgatcaccataatgaagaagtactcgttaacatggtccgtagccatggtattgaagacttagcctttttatttttacttaatgcgatctgtgtagcaattcctggcttatccaacggaatcttttgtgttctcaacggaatcctttatggccctgcctggggatttattgttaattggatcagtgacattttaggccaaataattttaatggaacttttgcaaaaactctatgacatgaaaaagatgtctaacagtaaagtttataagttattgactggattaaaatcaccaatgcttggattaattattggatatatgattccatttattccgagtgcgacagttagctatgtcaacattatgattaataaggagcaacgtaaaaaacagctaataccaatcattatcggtgtcatccccttcgcttacttatatgcttatggtggcgattcaatcttgcacttagacggaacacgattgattaaagttgtaatctcattcgttgtcattgctttaattgcagtagctattttgcttagtctgagagcaatcaaaaagcgtacaaaaaaagcttgaatttactcaagcttttttattatgcctagcatatttaaactaagttagcttcttctaacagttcttcgacccaagttctcttgattttcttcatccctgttttgagagctaacttctcaggtaatggcatctcttgatcaactaatttcttcttgtcagacatgtagtacatcgcacgaagcaattgacgaatatcataaattgagtcaaatacttcaggtacaccacggtcaacgttaagcaatgtataaacagcttccatggcagttctgacagaatattcggtggtaaagacagtgtctctagttggtgattcggcaaaattgccaataaaggcaatattaactgatccttctggaacaacatctggacggtccccatcatgacgaggcataaagtaactagtgatatatggcatgtaaactggtacggtattcatattttcttcactagccaattcgctgatttgactctctggcacgcctaagtgatagagcatttcctcggcaatttctttaccagtacagtcaacgactctcttcttgatgtaattaccctcagtatcagaatacaaagcataaatccaaacaacgatttgatctggattctggctcttaaagtgaggttgacggtgaatagtaaagctaagttcccaattagagtcaacaacagtgataattccaccagtattaactttaccatcgtaaaggctgcgcttagtcaagcgttcaaagtatggagctattttcttattttccaaggtagctgtagctgatacgaaccaactacgctctggcaagttttcacagaagacatctggatgaccaaagtcaggatcttgtttagccaaattttcccataatttccatgaagagcccttgtcgtgagtaattggtgctggggtattttgatcaccataagtagaactttcagtgattgaaccgttagtcacaaagacaatatcatctggggttaaatcaatatcactttgctcaccattcttggtcatcacgatcttcttggcaaccttttgcttgccctcatgatcaacaaccacgttatcaacgtgacaatcatattcaaattgaacaccgtgatcttttaaatatgccaaaagtggcttaaccatggactcatattggttatacttgttaaacttcaatgcggtaaagtcaggcaaaccatcaatatggtgaataaagcgcattgcataacgccgcatttcggctgctgagtgccatttttcaaaggcaaacattgttgcccagtatgtccagaaattagtcttaaagaagtcatcactgaagaattcttcaattgtttcaccttggagttccttttccggtgtcatgattaacttcacgatttcattagtgcacttacctagaccatattgaccatcacttggtaagcgatcaccgcgattataaattagacggcaattggatgagttaggatcttctttatcaagccaataatattcatctaagtatgatgcgccagggatttccaaacttggaatcgatctgtacatatcccacaaacattcaaagtggttctccatttcgcggccgccccgaaccacgaaacctgcattaggacgcttagcaccatcaagtgaaccaccagctacgggtagctcttctaaaatatgaatattttcacccttcatttgtgcatcacgaactaaaaagacagctgcagaaagaccggctaaaccactaccaataatataagcagattttttatctacgcctgcgggctttttggcatccgcaaaagcctcataattaccattggaatagtacataaagatatcctcttttctgtataagtatagtttttaacattacactttaattataaagaaagcggttactagatgcgagttttttagaagttttagctaataactttagaattctttattaattagtttctgccacagttcttgcatatcttttggatcattcaactcaattgttttacatttttgctggctaaatggatccggaaaatttaaataaaagcaatttaaggcttggcgtgaaaacccatcttgaattccatataaaggatcaccatataaggggtgtcccagataagccatgtgaacacggatctgatgggttctaccggtaagcaagcgtaactctaccaagctagcacctgtaacctgatctaggactcgatacgcggtttgagcgtcctttccatctgccactactgcacgtttaactccactaccctttttgccaatcggttgatcaattaaaccagttaactcattcggagcaaaattgccatgtacaattgcatgatattttttgacaaatttctccttgccaattttactaaaacgagcatgggaaattgcatttttccccaccaatactaaaccagatgtatctcgatctaatctagtaataacatgcggcttcaaatttttctgtcctttttgggcaaaataacccaacaatcgattgaccaccgcatcatcatcttcatagcgtgagggaattgacaacacacctgcaggtttgttaactacaagataatttttattctccaacacaattgatactggattattcgatggctttaaaaaatcatttttcttttcttcaccactgataaaaatcacttcatccccagcacgcaaattaaagctagtatatcttcttttatgatttactaaaatcatgccatgatggtgtttagcattgtttaacgcttgatgcgaaaaaccattttttaacaaaaaaggacccagctttttggggtctctttcttgcacaattagtttaaataaactagtcatttttttcattatctccaataaacgcattttgtacgcgtgaccaaaaatgatggtggccaaattgatcaaactgaatcgaatgccgcgaaattcgatattcaatcttcttagcattacgtacatcaattcttgctccatcaactgtcatcacaaaatgatctgcattaggaacaatcgaaatccattgatcaggcgcaatcacaattggtgatgacaaagttctaaaaactcgattattaattgaggcaatttcagtcatttgcaacgcttttagccggggatgaattactgcaccacctagtgatttgccataagcagtcgaacctgttggtgttgaaacgcaaagaccatcgcctcgaaagttttcaaataattgatcattaatgtacacatcggcctctaatgtatgtgaaactcttttaaccgctgattcattgacggctaaatggtaatgagtttcacctgattcagtgagcatctttatttctagtaaaggatacttcgctggttcacccttggttactgctaaagcatcaaccattttttcaatatcatagttacgccaatcagtataaaaacctaagtggccagtatgaatcccaataaagcgcacagaatctacttgattttcatagcggtggaaggcattgatgagggtgccatcaccgccaacagtgatcactacatcaggatatctagcatcaaagataaaacctttttcctgaagcagcttcttaagctgcgcaactgtctttaatgtttcatcatagttattatgcgctattgttactttcataatttttctttgcccttatttttggtaaaaattttctgagcttcttggacctcatccttaattgacgacatttcttcgtctagtctataagcggcttcagccgttgattttaatctagctgaaatgtcatcaggatagacaccttgatatttgtaatttaaagtatgttcgacagtagcccaaaagttcattgccatagttctaatctgaacttccgcaattaattttttcggaccttctggtaagtaaaccgtatagttaatcaccatgtggtatgaccgatatccactcggcttagcattttgaatataatcacgctcctcaacaacttccatatcatctcgagcatgaatcaaatctactaccttataaatatcgtctacaaattgagtaacaatcctaatccctgcaatatcttgcatatcagtctcaatgacatcaggactaattactcgccgtttcattttttccttgatagaatcaactgtctttacccggccaattacaaattcaataggtgaatgttctcccttagttaaaaagccttgtctaagggaacgaaatttaacctttaactcgcgaacagcttcgttataaggccacaagaagttatcccaatctaattccatgagaaaacattcctttcttaagcaaacaaactcattttaccatataattaagttaaacagttcggaggaaaaacagatgagtaaaaatcgagaaattgaagcaaaaactcttttaaataaaagcgtttatgatcagatcactgccgcttttccaatcaaaagtgactttacccaagaaaattattattttgatacagcagatgatttattaaaaaatcatcaaattagcttgcgtattcgaatctatgctactcacgcagagcaaacaatgaaggtaccggatcctaatcctgtacaaaagaatttccatgaagtaattgaaattaatgatgaattaactcacgctcaagctaaaaaattagtagcaaaaaagcattttaaattcactggtaatattggcgcatatctagataatcattttgccaatgaccaaaaaaagctacatcttttcacctggagcaaaacccgcagaattttgatgaacgggccacaaaactgtgaattaactctagatgctacgtcttatccagataactatcaagattttgaattagaaatcgaaaatactaatcctgctttaattcaaacagtattaactaaacttgaacaagaatatgactttgaacaaacggctgctaacactaatcaaagcaaaatagctcgtgcaagcgctcaccaaaaatagtatatagaaaataaggcatattttttgtcacttattttttttcttgctaaagtaactaatagtaaatcaccaaagaggtcgagattatgtttgagatttttctattcatcaatccaatagggatttattgttatgacactgaaaaacagattcgtaaaaccgttgatgaattaggggtcgacgtttgttatcactatattcccattgcaaatgtttgtttaatcaatgatgatgcgattcgccgacgcaaagatgaccagaagttgcctgatattagtaatttttctagagcaacttatgaagcattagaaaattaccacgcgattaggctggcctatggcaacaaaaaagcccgtcaatacctgtatgaattacaaaaaaacttgagcaaagatgcttcagcttatacacctgagctgcttaagcggatcgcaaacaaattacatatcaaggatgcggatattcaggcaatcaaacaaactgattacctgcgtacttctattgaagaagatcaaaaactagccaaccaatggaatattaaagctactcctaccaccgttatctttaacgaagacaacgagcaaaatggagtattgctagagggaccaatcaatcaacaggatttagttaatctaatgcttccagattgtcaaaagtgtttttcagactatttacctgcggagcatcatttacgccttatctaaaggcgttttatttttgcaaaaaatcactaacccgatctctttcacctgggttacgccaagtagcaaaaactttatcaggtaaatcatcaagagttaatttgcgttcataaagcatctctcctattttcaatcctaacttttttttttgcataatttgctggcgtaaatattttctttgagttgcaatgttcaaagaatattcttttttgaatggcttaaagcgccaaaaatcttttatccccaattcatcaaggacaaatgatttactttgataaaccaatttattagctaccggttcttcgaaaacattatattttaagcaaaaacgatttctctgtggattaatttctaaatagtaattcccccaagctttattttgtcgaaagaaaatcaactgtgtgcgtttcaatcgccgtttcaaatagtgtcgctgtcccacaatccaaatatcttttacaccaattttttgataaagctgatgccgatggttaaattcttgttgactcaacggcgcacattgaacttcaaacgctaacttagcagttgctaagacatctgcacgcaattgtccttcagctaatggaatctcaacttctgccggaaaaccagctgccgtcaaagctgacttcaacagcattttcgattggtgatgctcctctttttcacccattaagttactgtacttcacaagatgcttaaaaaaggctgctttttgctccgacataaccaaaattacttttttattgcaatgtggacagtgataattatcacgattcaatttcttttgccttgcattaactaaacatgcttcgtcaactgcaaggactaatttcttatttaacatggctgcatacatttttctcacccatgttttattacgtaaaaaagagacggaattttgtcccgtctctttttctttaaagaatcttaataattagctgcttttaaaaagtaatgtcgaatctggcctaaagcattttgcatcaataagcatttgcctgtttcttcaactacacgcatcttatcactatcgaccttaaaaccaaattcgttggctattgtccacgcatctgctggtttaagctcctcatattcttcatcaagaaatgccaaatttaagaaatattgtccatgcaagtaatacaagctagaagctaaatcatttgccttaaggttatcagctaattcaattagactacctaaatcatcaaaatagtaagcctgagtcttgcgcgatctccaatcagttggctcattgtttttatcatcttggttaaaaaagttgtgagtagctggtccttgaggagccgaatttgaattcgtactctcctcatctaaatcaaagaaactttttgaatcatccgaattcgttgatgattgctcatccttaggaaagctatcacccattagtttccttaaattctgtgcatcgtccggcttaactttggtgatcatcaaatctaatcccccattattaggcattacttgaaatgatactggatcaccattggcaaattcatggtcttcatcgacctcatcaagaattttatagaagaagtcttgaatcttttgtctattacctaataaatcaagcattcccatcccacgacgagccaattcagctttatcaattcgaactctgatagtattcttatcaatatgatctacctgcacaggatctcacctccatgaattaatatatctattgtagcgtatttttcgtttaaaataaaagtgttagtctcaacaaaagccttaactaacacttttcaatcattttataaatctgcaatcttttgtgcttcagccaattccaaccgacgaacttttcgtggcaagaatcgacgaatttcatcttcattgtaaccaacttgaagtcgacgatcatccataatgattggtcttcttaacaagctaggattcttttctactaaatcaagtaactgatcaattgataaatcgtctaaattgattcgcaattgttgaaaagctcttgagcgggtagaaatgatttcctcagtaccattttcagtcatccgcaagatctttaataattcttttttagtcaatggttcagaaaaaatgtttctttccttgaatggaatattatgtttttcaagccacgctcttgccttgcgacatgaagtacaactaggagagacatataaatctaccataaaaatcacgctcctcagaacaaatatttgtatacgtttctttactcatagctagtataccatataagcttctttttcgtaagtgcttaatttatcgtttacctctgctatttacttaatactaaagataaaacgtgaattatttgtgaagatttcgttcgttttgtttaaaattattaaaaataaaaaaagagacatcacagtctctttttgcaaattaaaactacttgttcaattttttcattaaattattaactaatttttcgttgtcttcagcagtttctgatacataacaagcttcgttagctaattctttaatgtcagcagtgttcaatttcttcattaagcttctgatacgcaaaattgaagttgcactcattgagtattcatcaagtcccattgaaagtaagattgggaacatagtgttatcaccagcagcttcaccacacataccacaccaaataccgttttcatgagcaccatcaatagtgtgcttaatcaaacgaagtactgatgggttatatggttggtacaagtatgacacattatcattaccacggtcagcagccatagtatattgaattaagtcattagtaccaattgagaagaagtcaacttcctttgcaaattgatcagctaaaacggctgcagcaggtacttcaatcatcataccgacttgcaagtcatcaccaatcttaacgccttctttagcgagcttatctttttcttcagctaaaatttgcttagcttcacgtaattctgctaaagtaccgatcattgggaacataattcctaatggaccgtatgcagatgcacgaagtaaagctcttaattgagttctaaagatatccttgtattgcatagaaagacggatagcacgaacacctaagaatgggttcatttcttctggaagatcccagtaatcaaggtgcttgtcaccaccgatatcacaggttctgataatggtttgcttaccattcataccttcaataacttccttgtaggcatcaaattgagcttcttcagttggaaagtcactagagtccatgtacaagaactctgttctgtacaaaccaatggcttccgcaccattatcctttacacctggcatatcattaggtgtaccaatgttagcagcaatgataaatttcttaccatctgcagtaactgatggttcattcttaagcttagcccattctgccttttgcttaatgaatgcttcactcttttgcttgtaatcagctacttgagcgtcacttggatcaataattgcatccccgtcaagaccatcagcaattaacatatcgccgttcttaacatccttagtaattgagtcagtaccaacaacagctggcaattcaagtgaacgagccataatagctgagtgagctgtacgaccaccaatatcagtaacaaaacccttaacatactttttgttaagttgagcagtgtcacttggagttaagtcgtgagctacaacaattacttcatgatcgattgaagcaggatttggtaattccttaccaagaaggtgagccataatacgctttgaaacatcacgtacgtcagcagcacgttcttgcatgtaaggattatctgtcatcccttcaaaaatagcaataaacttcttagcagtctcatcaagagcagcttctgcgttgatctttgaatccttaatttcattctcaatggcaccagtaaattctgggtcatttaaaatcattaagtgtgcttcaaaaacttgagcttcttcatcgcccaagctttctttagcaatatcatgaatcttttcaacttcagcagttgaagtcttaattgcatcgttgtaacgagctacttcagcttcaacatcagcaattgaagatttagagaatgaaagatcaggctccacaagaagatatgctggagcaatagcgataccatcacttgcagcaattccttttaaagtcttggtcattattcagctaaaccttcttttttcatagtgtcggcaattgcgtccaatgcgtccttttcgtcatcaccttcagcagtgatagtaacatcagcattttgaccaacaccaagtgacataacacccatgattgacttcaagtttactgacttaccgttgtattccaagttaacatctgagccaaactttgaagcagcttgtactaaaagagtagctggacgtgcatgaatacctgtttctgcaatgatatgaaaatcgcgtttttccattataaatatctcctttaaattgaaaaattaaactggtaataaatacccattcgagtattagattatcatgtttttacagattagacaactgcaatgtaacagtttacattatttattcatcggtattcgtagcggtatacacaatcgcgccgcctctttctgccctaccggtaatatattgtctttttccataatttctaatagtcttttgaagatcaaacgcatcttttggctcaactttatactcttttatctcgcctgagactaattgatctagaattttctgataatccaaaaatatcaccactcttttaaaattttataatttttccactattaattctactcgtattatataaattaaatcgtattatataaattaaatcagtgataatgattattcttttagtttgtttattcgatcatcagatgctagtctctaattgtcattgaccttggtcaattggtataggttgtttccttctgtagctttgactacttttttagtctgccgcccaagcagttttactaatgacttactcacatgctgtatcgattctggctattactgattcagagcagattcagtcgcagctttttagcttgaacctatgaatacttatattttgcgagattgtcttagaatctgtaattagggactaacatgtgatgatcgatctatgaccaaatatttgctagaaaggaggccattctcaatgaaactttttatcggaattgacgttagttcaaaagatcttcaagtcgctattactgactcagaaaattatcaaaaacctttacttaaccaatctttttctaatgacctgattggtgctaatgaggtcaaaaagataattcttcaacttgctaaacagaacagctatgacaaagtaattatcggcatggaagccacttcaatctatagctttcaccctgcttatttctttgccaatgacgaagatttacaaaaaattaatcttgaaactgatgtcattaatcctaaaaacactaaacgatttcatgacgtttacgaagaaaataagaatgatcctactgatgcctattacatcgctgaatacttacgctttggtaaataccatgtcactattgctcggcaagaggaatacttagctttacagcgtttaactagagctagatatgaaatcacatcttcgctcactagagctaagcagcacttcattgaaactctttattatcgtgtaaacaaactagttaccgttgacaaagacaatattaaaacttctatctttggcgcaacgatgctgtcaattgttactgatagtaaaaccatcgatgaaatcgctgaaatgccaatcgaggatctaattgactaccttcaaaccaaaggacgtggccgcttctctgatccagagactttagctaaagcgatcagaaaagccgttagaggatcatatcgcttaggtaaagtcatgaaagactcgattgatgccgtattatctgtttactatgccgaaattaaaactaatcagaaattgattaagaacttagataaagcaattacagatatcgtccaaacgcttcctgaagagagaatactacaatctattccaggaattgggtcagtttattccgctggtattatcgctgaaatcggcagtattgaccgctttgacactgaagcacagctagctaaatacgctggtctagcttggcgtcaaaagcaatctagtaattttgatagcgaacacaaaccgatgactaaaaacggaaatcattatctaagatattatttggttgaagctgccaacctgattagacaaagagatcccgtttttcggaagtactatcaaaagaaatacgatgaagctttctattctccgcataaacgcgcttgcgttctttgtgcaagaaaattaaccaggaccattttcactctgctcaaaaatggtcaaatctatcaaacaccgaggtgattaattggtctaaaacatttttggaggagtaaataatagttgttaaaaaatcccttgaaatagggcttagtttcatgcacgcaaattttggttttaaaacaaactaattaaaaataaaatttaacttttacattgacttattaccacatgactatttatattcaattttcaaaaatattaatattttgtttgcggtaacaaaagtatttcttacaaaaaataagtgtttgagtcttagcacttgactaccaagagtgctaataatataattttggtacagttgaaaagaaaggcggtactatattttgctttgccaaaattgtcatgagcggcccgcttctattcaccttttcactaaggttaatggccaaagccgcgaaatagatttatgtcaacactgttatcaagaattaaaaaatcaacaaggaaatcaaggaaaaatgaataataatgaattttttggcgactttgatgatttattcaacgcattaaacggaaataacaacaatgccgcaaacaataataatgaaatgagaaataacgaccctagaatgcaaatggggggaggcgctggtaatggtggtcaaaacggcagaagcctacttgaccaatacggaacagacttaactgcccttgctaaaaaaggcaaaattgacccagtaatcggtcgtgataaagagattgctcgggttatcgaaattttaaatagaagaactaagaacaaccctgttttaatcggtgaagcaggtgttggtaagactgccgttgtcgaaggcttagctcaagaaatcgtagatggatcagtaccagcaaaattgcagaacaaacgaattatttcattaaatgttgtttcacttgttcaaggtaccggtattcgtggtcaatttgaacaaagaatggaacaattaattaaagaattacaacaaaacgacgatatcattctttttattgatgaaattcacgaaatcgttggtgccggtaatgctgaaggtggcatggatgccggtaacattattaagccagctttggctcgtggcgaattgcaattagttggtgctactaccatcaaagaataccgcgatattgaaaaagactctgctttagctagacgttttcaaccagttgaagttaaagaaccttcaattgacgaaacaattcgcatcttaaaaggtattcaaaaacgctacgaagactatcaccatgttcactacactgatgaagccattgaagctgccgcaaaactttcagcacgttatattcaagatagatttttaccagacaaggctattgaccttcttgatgaagcaggttctagaatgaacttaaccattccttatattgataaggataaaatgcaagaaagaattaatgccgcagagcaattgaaggaagaagccttaaaaaacgaagattacgaaaaagcagcctactaccgtgatcaaattgaaaaatatgaaaaggttaaagatcaaaaggtagatcctgacaagtcccctgttattactgataagatcatggacaagatcgtagaagaaaaaacaggcattcctgttggtgatattcaaaagcaagaagaaaaccaactgcaaaatctagctgctgatttaaaggctcacgttatcggccaagacaaggctgttgaaaaagtagctcgtgccattcgtcgtaaccgaatcggtttcaacaagtcaggccgtccaattggttcattcctcttcgttggtccaactggtgtcggtaaaactgagttagctaagcaactggctaagcaaatgtttggctcagaagatgcaatgattcgtttcgatatgtctgaatacatggaacaatactcagtttccaaattaattggttctgctccaggttacgtaggctacgaagaagctggtcaattaactgaacaagttagacacaacccatatagtttgatcttgcttgatgaaattgaaaaagctcacccagatgttttgaacctcttcttgcaaattcttgacgatggtcgtttaactgactcacaaggtagaacagtttcattcaaggataccatcattattatgacttctaatgcaggacaaggcattaagaacgctagcgttggctttacagcagaaaacgaagatgaagctaatgaatctgctagaaataatatgagccaattctttaagccagaatttttgaaccgtcttgatgatgtaatcgaatttaatgaattgactaagccagacttgcttaagattgttgacttaatgttgcaaaataccaacaatatggttaaggatcaaggcctacacattgatgtaactgctgctgcaaaagataaattagttgaagatggctttaatcctgccttaggtgctcgtcctcttcgtcgtaccatccaagaagagattgaggataatgtggctgatttcaaacttgatcatgcacaggctaagaatttaaaagccgatgttgttgatggtaaaattgtaatcagtgatgaagcaaataatgaataggatttaataaaagacaaagtccaagttataccaaaagatttcgaagcaatattcgaaatcttttttcttaaaaataaaaatatgctactcaatttgaggtatactaaattagaagaagtaaagctaacagaaacaggtgaattccatgcatttaattgatgtaaccaataattactctgatttggttcacagtcagctcaacactaccgatgcaaactatgttaaagtttattctcttggtaatacttcagttatttatactgaaagtaaggattctatcggtattgcacttgaaaaccatgaccgtcgtgttcgcgaagatgagattgaattcgtaatcaagcgtttaattaaagattatgattcttcatacactttgactgtagacaagagtcgtcatgtaatcgaaattcacgttgacaagtaatccaaatattgttgtatcaaaaaaggaggattgattcattcaattctcctttttctttttgctttaaagtttttctgttaattcaacatctggatatttgtcatggaagaaacgttccgcaaattcattttcaaataagaataatggattaccataacggtccttaactaataagttacgagtattagacatgcgtgggtcaagctgttccggatcaatccagcgcgcaacacgatgaccaatactgttcatttcaacttcagaattatattcattcttcattctgaattggaacacttcaaactgcaattgaccaacagcaccaagaatatactcatccgtttgataattgcggtaaagctgaattgcaccttcttggactagctggttcatccccttatggaatgatttttgcttcatcacgttcttagcagttactcgcataaataattcaggtgtaaattctggtaatggtggataaacaatcttgcgcttaccagcataaatactgtcaccaatttgaaaattaccagtatcgtataagccaactatatcgccagctaccgcatcagaaacttgtactcgctcgcttgacatgaattcagtcgcattatttaaacgaattggcttatcagttctagctaaagttacgtccaagcctttcttgaattcaccagaaccgactctaacaaaggcgattcggtcacggtgatgaggattcatattagcctgaatcttgaagacaaagcctgaaaattctggatcttctggacttagctcctcatccccattaactgtgtgactctctggtgctggagccaaatcaacaaagctgttcaagaatgtctcaaccccaaaattggtcaaagctgagccaaagaagacaggagtttgatcacccatagcaatcttctcgcggtcaaacttgttcccagcttctttaatcaaatcaatttcatccagagtatcctggaattgaggatcttgactaagtggctcactatcaggcaacttaccatcttgatctaatggtaaaaagcgatcttgatcatttttgcggtaaagctcaacacgattattagcgatgtcatatagaccctttaaagtttgacctgaaccaattggccagtccattgctacaccctcgataccaagcaaatcttccaattccgcaattaaatctaatggtggacgtccatcacgatcaagcttgttcataaacgtgaaaattggaataccacgttgcttaacaaccttaaacaacttctttgtctgtggctcgatacctttagcagagtcaattaccatgacagctgagtcaacggccattaatgtacggtaagtatcttctgagaagtcctggtgtcctggcgtatccaaaatattgatacgtttgccttgatattcaaactgcataaccgaactagtaacagaaatcccacgcttcttttcgatttccatccagtcactagtagcaaaattgccagttttacgtgccttaaccgtacctgctttacgaattaccccaccaaacaaaagcatttgttcagtaatcgttgtcttacctgcatcggggtgagaaataattgcaaatgttcttctcttttttactttatctgctaactctttgtccattagtcctcgctatcttcttccttttttgattcatcaatcgttaataataccgtcaacaagcgtgaccccttcatccttctagtggtcaaagtcatcccatcaccaatatcaactgttaacttttctcccttagctggaatcacttttaaagtattgatcacatagcctgctatcgtatcaacatcttccatttgaagattagtaccaaattgctcattaaaatcatctaatggcatcttaccgtaaataatgtacttatttgtagctatttgattaaaaagaatctcagtgtgatcaacctcatcatcaatatcgcccacaatctcttcaaccaaatcttcaattgtagctaatccagttacaccgccatattcatctgtcaaaattgctaattgtcgttgcgtttgctgcatttccatcaacaaatcgcccagctcggcagtttctggtgcaaacagcggctcagtcatgacatctttatagtcaagattatcaaaacccttttgtttagcctttcgtaaaaccgttctgatatgaataatccctacaatcttatccttatcacgttgataaacgggaattctagaatatggctcacgaaggatttcatctagattgtcttgaaaactgacttctcgatcaaccatgaaagcatccgttctaggtaccattacttcacgggctgtcttaccctgaaagtccaaaataccttctagcattgaaaattctgtatcatcaattttatgactttcatgtaaagtaacaatttctttttctaaatgatctttagtccccacttttttatcgccggataatctattttttaagcgaccaaacagagttcccgctccaggatcactattcattttcgtactctctttcttaaaaaagttatctaaatatagctattatagcatagagccaataacaattatgttaaaatagcacataagactaggaggttcgtcatgaaaaaaagtcatgtcttactcgtttttacatttcttttgctaattccctatatctgtagcttagctattattggaatcggctataatgcattagttttacattcagctgaactttatcgcacattaatcggctcattagttggcgcaatcattatgtttgctgtcaaggctactattcaacggcctgttgatttattagctgttcaaaccaacgatggcttactgaagcagcttttacgtttcttcagtatcagacggcgctactggcttttagcagctaatattatcttagactttgttctttgctttgctgctacctacataatacgtgctcttttaacacttgatcaaatcgtaggcggctccatcggctttgttttgttaatcatgtttgtttcaacttgtcttggcgcttatgttgaatacgataacctgtcaatcgaccctgagcagcattaattacttgctggccttcaagtacattacttgggccagtttttttgtatccatgtcaagatcccaagtaatatatggcgtgtcactgtcacccaaattttcatgtacttcaattccgctagcaactacttttttggcaaaatttggcacggtactagtcaacggtaagttgaaaaagactaaagtttgattctcttctacttcctccgctacctctgcagctggtaattcaaacttcattaaacccgttggcacttcatcttttgctacatctgctaaaacgccataccaatacataaagctgtcctcacctgataccactaggacagaacgcttattttctaaattatgatcagctaaaaatttttgaaaagtttcatcattttccatttgctgattagcttccataaagctcttttgagcattcatcaaaccagctggaaatggacgaccaataaataatcttgattcaatatttttcttcattttttctcctaatattctactaattcgtctaaatcaattatttcaccgtttaaaaaggcatcaatctcacctgatgaaaaaccgtgactaaacaaatatttttttattttaaaattgcgttcaatttctggaagatttctaaaacgcttgtaagccttaattccttgtttcttcaaagcttctgtttgtgcattctcatcttctttaagatccattgcatcaataataacgttactaatcccgctatcaaagccatgcgttaataatttagtacgcatcttacgctctaattcacgttgtgaaatcttgccaacttgatggctcatcgacttaatcacgcgttggcccacttcgagccaatcttcttcatcaatttcatctaacttatcctgactaatttcaggatcaacgcctttttgcgtcaactttcgtaataaaattttagggccatcagagccaacacgcaaatcatttttgataaacagcttggcatattgacgatcatcaagatagcctaattcattcaattgactaacagcactattggctgcttcatcagagatttcgtgtttttttaaatattgcagcacctcaaagatggtccgaggctcgtaactcaaaaaatgagccgctaaatcactagccttagcatcagcatcaaattgcctaatcttttcaacctgctcatcatttaattctttacctttaagcagcacaaattctgccaacgttttctctccggcagaaaaagcatattttccatcaataaaaacattatagcgacctggccgtttttgtgcacttactttggttatgatcaacttgtttcacctcgcatatttttctacatccatgctagcaaattttgctaaagcttgctaagaactttttccaggtagtacaattaattgaacacaatttagtttttagtagaaagaattaacgatgaacagaaaatttacccataataaaccaaaacatgaaaaagacgtcatcatcactattaaacgtttaggaattaatggtgaaggaattggttactacaagaaaaagattatcttcattcctggtgccttgccagacgaagtagtagttgccaagattgttaaatcatatccacactacatccaaggcgaactggttagaattaaagaaaaaagtccagatcgcgtagacttccctgaaggtgttgatcccgagattggtggcttagaattagtgcacttgtcttacgacaaacaacttgaattcaagaagaacaatatgcttgaatcattacgcaagtaccatcctcgtaattacaataagtataaagttaaaaatactatcgctgctcctgacccatggcattatcgcaacaaggctcaatatcaaattgaaaaagatcatggtcaacttaagcttggactttttgctccaaattcccaccgcttgattgacttaccaaagatgccaactcaaagtgaagatacacaaaaaacggaacgtaaaatcaaggttttaattgaaaaattgcatgttcctgttgccaactatcgtcgtcatttacctggcattaagaccgtagttgtccgtcaatcagaagcaactaaggaaatccaggtaaccttgatttcgatcggccacaagattaagaacttaatccctcttgctaaagaaattatgaaacttggtcatgtagtttctgtctatcagaatgaaaccgaatggcagaatccacaagtttggggaaataaaaccgaaaagcttttgggcaagaatcaaatcaccgaagaaatcttaggtaaaaaattcgccttatcaccacgtgccttcttccaattgaacccagttcaaaccatcaatctttactcagaagcattgaaatacttagacctaacccccgatcaaaccttgattgatgcctatagtggtgttggtaccttaggtattttggcagctgaccgcgttaagcaagttgttggaatcgaaaccattccagaggcagtcaaagacgcacaacataatgtcgagcttaaccacatcaaaaacgctgattatattcaaggcagtgttgaaaaggttttgccagaattacaaaatagtggtgttgcaatcaatgctttaatcgtagacccaccaagaatgggcttagctaaaagcttgatcaaaaccctcttgcgggttaaacctgaaacttttgtctacatctcatgtaatccctcaaccttagctcaagacttagttttacttagcgaggcatatgatgttcgggtcatccaaaatgtagacatgttaccacaaaccccacgctgtgaggcaattgctaagttagtgctcagaaaagatagataaatccaacaacctagtcttgggctaggttgtttttgtatataaaaaagcggctactggacaatcctgtcccttagtagccgcaatttcaagtggatgaggtagctcatcaattgatagtcacgatttttagttgtttggtatgtatttaaacaatggcattatcgcaaccaatattaacattcacttgttcgggtctttacataaaatgtaacttttaataaattggagtttttgcgaacagccaatgataattaatcaaataatttttaattaagctatttatggctgacacctctacgtatagagaatctttcaagtttccaataataatacaattctggagataaaaacttacttatatttttttatagttgttaacttttatttctacctcttccacactattcattatatctagttgtgaaaccgtttacaagaactaacccatatatttttgcaaaaatctttctacttgttgtcgatattgctttggatacattggataagacaaagcatgccctgcaagtggcgcaagccaaatttgcttttgagcagctgttgccgcataattttgccagaccatcttagttggcacaaagtgatccttgccgccatgaataaataaaaatggtcgcgtatttttatttaactgagcaaccgcagaagcatcttttaaataaaagccatttttcactctattaattccactaaccaaatcaactattggaaaccgtggaaaagccttcatatgaaataaattttgagcttgatagttaatttcacctttcacggttgaataaccacaatcttcaataaaagctttcacttgtggtggcaaaagcataccgcttaccatcattgccgttgcaccacccatgctttgacccataattacaattttggcatttgtaccagtttgatcaattacttgatagatccaacgcaaaatatcatctttttcagcccagccatagccgatatacttaccttcgctgcgcccttgggcacgtgcgtctggaacgagaacattataaccaaaatcataaaacattttggcaaaaccagccatactatctccatcactcataaagccatgtaataaaattgcggttttttggcatgtttatcaaggtactgggcgaacaaagttatgccgctatcagtttttaaagtccatgttttcttagaaaaatctctaaaccaaaccttatcacgataaagtggatccttgcctgataattctttggagtcagcttttttattaaacggtgtcatcgccatcttgaaaaagtactcgcttgccgcaaacaagccagctccagcaattaatgcggaagacaataatagtttctttttcatcttttaacacttccaaattcaattatttcacttttcattttataattaaattgctgaaaatttacaatccttatgacttaattatactgaaaaatgcgcttaacagacttgcttcaattaatcgatgacctgaacctgaatactaaattttatctaaagcatgatgacaaactacttaagtggggaaaactcactattgccgaaggaaaatgtctgctgctacccgggcaaacagcaatgaccaaacaaaaattgattaaattagttggccgcatgcgtggtcgcggcatccccttgttaatggtcattgaccaaaaagaatattccattttcggcctacagattcgcgaagatactggacaagcaattttaatgtaaaaagtgtctgggaaaaaactaagtctcagatcatgaaaaaagaacgttgaatttttgtttcaacgctctttttgtatacttttagctccagccttgatattattaaatcatcacaaaataaaaaaggtggaaactaacatgtacaagaattatatcacaggtcaaactgctttaacacttaatctagattttgccattccggccaatcatttggctaatgtcatcagctggtttgtagattcaattccagaagatgttttagtaggcaagactgctaaaacgggccgcccagcctatcatccagccatgatgctcaaaatactgctttttgcttactccagaagagttttttctggcagaaagattgagttgatgctggaagaaaatctgccaatgatgatcttggctgaccagcaaaagatttcatatcatactatcaataattttagatcaagcagccatgccaatgaactgattaaaaagagctttatctacttcactaacctgttagaagatgaaggcttaatcaatgaaggtgctgcttttatcgatggtactaagattgaagctgatgctaaccgctatacatttgtctggcgcaaagcggttgaaaagtatcatgaaaagctgaaaggccaggcagttgaactttatgatgaattgattactaaagaagtagtcaaagaaatggaaaaagaaaaagttcaaactagtcaggggctaaaggaattagctcaagaaactgaagcagaaattaacaagctgactaaagagattgagcaggaaaacaaagccattcctggcggttcacctcgaaaagccaagcgacgtggactaaaaaagattctgcaccggctaagaaaagattatgtgccaagaatgcaaaaatatgaagaagccgaagagatctttgccggacgcaacagttattccaaaacagatcatgacgccacctttatgcatatgaaggaagaccacatgaaaaatggtcaattaaagcctggctacaatattcaagcagtcacgaccgatcaatatgtagttgattatgccatctttcctaatccgacagatttcaaaactttggagccggttttggatcaaatgaccgtgttggacaagtttgacaaaatcgtcgccgatgctggctatggcagtgaatacaattattcgatgctggaggaaaaatatccagacaagaagtactttattccctacactatgtatgaaaaagaacagaccaaaaagtataagaatgatccaactaagctaatcaactggtactacaatgaaaaagatgattattacattgatcatcatggcgtcagattcaatttcaaatattacagccagcgcaaggatcgttctactggtcaggtccgtgattttaaggtttatgaggcagacgagttccagctaacgccagaattggaacaattggctaaaacagctagcggccgccagcgccaagttcgctataatcctaactggcaatatttaaaagaaaaagcaaaagaagttctccaaagcgaagaaggcagacacatctatggcatgagaaaatatgatgtagagccagttttcggacatttgaagaacgtatttggcatgcgcagaacgcacctgcgaggtaaagagaaggtcgaaaccgatatcggaattgcctttatgatgatgaatttgaacaaatattgtcaaagaaggtggctgaagggccgatttttattgttaaaaattttaaagagaacaaaaaaacgatcaagattcttaaaaaaggaaatcttgatcgtttttattcatctggaagctagttttttcccagacactttcttattcttttacgcggtattgacgaatatgatccttagtaccagcaaaataccaagtacctacttcatcgtcgctagttaattctaagccatcctcaggatctaacaaagccgtattgaagacgtcttcatattgcttaactgtcagcttcttccgccgatcaagcattgcttgatcagctgtaggatcaacttgtttttcatatccttcaaccaacttgccactataaaactcagccattgcacctgaaccatatgaaaacaggccaattaatgagccagcaggtaattcaccattctctagcaaactaagtaaactcatataaagtgaagcggtgtagatattacctactcggcttgataattgtttagcagccgcaaaactacgctccaacttgatcattgttgcttgatcttgcccctcaatcgcaatattattagcttttaagcccatcttagtaaaaggtaaatgataagtaattgcatcaaaatcactagtctttaatcctttttgcttcttataatcagtaaaggtcttcttgaagaaatccaagtaaacttgagtcgaatacttgccgtcaactaaagcggtgcgagaataatttggtctccagaagtcgttaatatcttcgctgtaagctgaatgaccattatttagggctaaaatgcttgggtcagctttgatgagcattgccacgctaccggctccttgtgttacctcaccagcagtattaacaccatagcgagcaatatcactaccgatgacaattgcggtttgttcaggatgtacccgaacaaaatcacgtgccatcattaaggatgccgttaaaccaaagcaagcttcctttacttcaaaagttcttacttctggcttcaactttaaggctgtttttacaaataaagaagctgactttgattgatcaatactactttcagtcccaaaaattaatagaccaactttgttcttatcaatcttgtcaataaactttaaagtcgcattaattcccattgaaactgcatcttgcgtaatatccgcaacactcatctctctttgaccaatgccaactaaaaacttattttgatcttgctttcttgcgttcgccaaatcgaccatatcaacgtacttgtctggcgtaaaaagtccaatttgatcaatacctacttgcattatttttgctaaaagctccttagcatgactttcagaataatttttttcactaatcatcgcagctagtagctgcttgcgctcatgttcattatcggttaactcagcaaccacatttctcgcctgcagtttcatatgtcctgcttgaatgccaacagtagaaattgccagcaaagctgctaggttgttggctaaagccacgctaacaataatctcagctagagttttactcgtgattttttgtcctaaaatagcaaaactttgttggacgtcatgacgggccttaattgagccaccaactactccgatcgccattggcaacgttaattcgccaactaaataactaccctgcatcgtccactttgataaactgcgatattggccatcatgattggctaaaactgcagtggctgcttcaattgcccgataatcattgcctgtggcgattaagacggcgtcggctccattcatgattcccttattgttagttaccgcacgataaggatcgtcaattccaatttttcctaatagagcaacacgttgtgcaacttgcatcccaccaatcgtttgtggatcaatcttcactttagccgtggccaattggctaggataatttgataaaatcgcaaataatttttcatcaacaccagcataattttctaatttagccgctaaaaattccaaaatcgagttggttttattcgcgcccatcgcctcagctggatcaaccaatacttttaagtaaagcaaatcctctttctgcacagcagttatttttctagtaccaccaccatgacggactaagctggaaaacttttgattagctaattcgactaagtgcggaaattctttttctaattcaattaatgaaaaagaattgttgaccttcaaaacgatttgaccataaatcccttgtcggtcgctgctagctgtcacaccaccatttctagcaaagatactagctccatgattggcggcagcaactactgagggttcttcaacagccattggcacccaatatttttgtccattgactattaagttttgtactacgcctaaaggcaaacgcaactgccctacaacattttcactcaattcatctagacgtctcagaaccgcatcatcgatttgctctaatgcaataccttcatcctgcaataatttacgtctagcttcaggctctaattgataaaatttcattctgcattctcgatttcataagcaatcgcctgaccgccaccaatacacaaagtaaccagggcacgtctgccttttctcttctttaatccactaattgcactagcaactaagcgtgtacccgttgcacctaaaggatgacctaacgcgattgcgccacccataatattcaatttatcagttggaatttgtaagtcgcgagctaccgctacactttgggctgcaaaggcttcatttaattcgataatatcatagtcatcaaaattacgccccgtcttcttaagcagttttttaactgcataatatggagtataacccatcagtgcaggatcaaagccagcttccgcaaattcacctaacttggcaatttgcgttaagcctaactctttcattttctccttagttgccagaactaacatacttgcaccatcagtcaaaggagacgagtttccggcagtcacttcaccatccgccttaaaaacaggctttaagttactcaatgcctcaagcgttgtatccggacgaattggttcatcatgatctaaactttgaccatcaatctccacatccaggatctcattatcaaaaaatccggatttaactgctacagctgcctttttatgcgactgcaatgcaaattcatccatatcctgacgactaacatgatatttttctgctacgttttcggcagtaattcccatatgcttgccagaaaaagcatccatcaaaccatcgttaagcatagtacttactaggtgatctgctggatcatttttgttttcttttttaacaaaataaggcgcattagtcatgctctcactaccgccgacagctactagatccaaatcgcctagttccatctgtccttgagctagacgtaaagctttcagacttgagccgcagacttcattaattgtaacggctgcagaagcttcactcatccctgaatgtaaggcaacttggcgagccatattctcacctaagccggtatccaaaacattccccataaacagtgcttgaacatcagctggcttaatattgcccgccttcattgttcctttcaaggccattacacccaaatcaattgcagaagcatccttaaaaaatcctcggtacttgccaaaaggtgttcttttagctgcaacaatataaatgtccttcatatattttctctccattctccataatgtgtattttttaacaaatatgataatagcaaaaaaatattaagaaaaacataaaaagactacgccgcagcgtagtctccctaataattaagcttattttttattttgcttaccttcagcttcaaacttcttgctcaattgcatgatatatgcccgcaattgttccttaatttctgggtgcttcaaaccatattcaattgaagtttcaaggtagccttctttgttaccaacatcatgacgttcgcctttaaaggcatgagcaaagacacgttgagtcttgttcattgtatcaatcgcatcagtcaattgaatttcaccgccacgacctggtttttggttagccaaaatatcaaaaatttcaggtgttaataagtaacgaccaataatggcataatcactaggtgctttatcaatatcaggcttttcaacgaatgacttaacattgatcagtcctggcatgatctcattttccggttcgatgacaccatacttagaaacttcttcatgtggcacaggcataactgcaattgtagaagcatgcgtcttgttatagcgatcgatcaattgcttggtcaatggcaccttatcttccattaagtcgtcgcccaacataactacaaatggttcatccccaacaaaactgcgagcacggaagatggcgtctcctaaacctgctggatgcggttgacgagtgtaatacaagttaacgcctaaatcagtaattccttcggttaggcgaagcaattcttttttacccttttcttccaaatcttgttctagttctggattagaatcaaagtgatcttcaattgggcgtttgttcttgccaattacaattaaaatatcttcgattcctgactttttagcctcttcaacgataaactgaattgttggtttatcaacgataggtaacatttccttaggtaaagccttagttgcaggtaaaaatctagtacccaaaccagctgatgggataacggcttttcttactttcataaaagcacactttctatttcaattttataagttcatcataacaaaatatgcatttttcagctacttagtttttcgtcttttcttttgaatataactggcaatacgaccagcagaatattcaacttgtccaacacggtttcgcacaatagcagcgttaacaccaacgccaaataaaaataatactgctgcaatattcaaccagagcataaagatgataaacgtaccaacaatgccataattctcccaagtaatcgggaaatggtgtaaatagaaactaaaaagaaatgatagggctaaccagcctacaacagttacaaaaactcctggccaaattactctctttttgagttttatattaggcaaaacatagttcaaataccataatgctagcatcataaccaatattaatactggatagcgataactaaagattttgctaatttcattaagtggtagctgaaaaatcggtcctaaaaagttgagtacttgttgcccaaaaaccaaggccaatgtagcaattgtaaatactagaatcatcaatcctgtaaaaacaaaagtaatagttctagtccaaagaaaattaagcattgataattttaattcaacttgatgaaccccataaagtctattttctccaagacgaattgcattaaccatatttgataatgaccaaactgcaaacacaataccaaaagaaatatagcctgttgatgtcgttttcaataaagaatttataattggcataatgaattttgacacttggtctggaaaaaccaagttcaaatattcagcaataggcgcagtatcaatgtgaaacaacggtaacacgttaccaatgataataataatcggaaaaatagaaaacaaaatgtagtaggcaataataattgaactagcaaatatctctccttgagataaggtggttcgtaatgtagaaataaattgcccaatttttaaaccaaaatggtttttaccatttttcatccattatcctaatcatccatctcatcaaagtgagggatgtacttttctaagccatcgtaaggatgctgcagggtcaagatcttaggaccatcttttgtaattgcaaaggtgtgttcaaattgagcagcattagaaccatctggagttgcgtagtaaacccaatcatcgttaggatcatcaacagtacgttggtcgatgtgccagtcgccaccagcttctaccataggttcacaagtaatagtcatgccttcacgcaagcgaagaccatgacctgccttgccccagtgaggaacttctggatcttcatgaattgatggttgaataccgtggccaattaattcacgtacatcaccgtaatgattttcatcttcaacataatgttggatagcagcaccgatatcaccaattctgttacctaaaacagcttggtcaattccgagatacattgcttttttggttacttcaattaatttcttatcagcttcggaaatttcgccaactggataagtagtacatgaatctgattcataaccgttcaagttgcaagttacatcaaccttaacgatatcgccttcctttaagatgcgatcttttcttggagtttggtgggcaatttcatcgttaaccgaaatacaagtaccatacttataaccctcaaaaccttgttctgaaaggcggccgccacgacttgatacgaagtcttgacaaaactcttcaattttccaggtagaaatgcctggcttaatcacatcacgtaagccttcaaacatagttgcaagaagatgtcctgaagcttgcatgcctttaagttcacgaattgatttaattgtaatcaaaataatttctcctttataaatttttatttagtttcagatatttctattataccgttttccaaaatacttttaaaaggtcgggtttttgtagaatcaaaacaaaactctagaaatacctgaaatatttttaaagtttgctaaaactaaacgtttttgcaatagtttcatgtataataaggtgtcgtataatgcagtgaaaggtatgaaaaatcatgaaagcaagaattgtttatgccagcatgactggtaacgatgaagacatggctgatattttagaagaagatcttcaagattatggctttgacgttgaaacaagtgatgtcggcttcactgatgccaatgactacttagatagtgatctttgcatttttatcacctacacctatggtgaaggcgtaatgactgatgaattggcagacttttatggggagttaaaagacttagatctaacaggcaaacattttgctgtgatgggttctggcgataagacctacggtgaacacttttgtgaaaatgtttttgactatgaaaaagcattcaaggattgcggcgcaactgaaattactaaacccgtaacaattgaaaatgcgccagatgatgatgcagtcgctgcaatcgatcaagctgcaaaggaaatggccgataagttaaatggctaataacaaaaaagacgtcacagctgttgatcaggcacaaatacgccgtctaggtcaaaaattaatcaagcgacaccgtaatctttgggtttacatggttttcggctttgtcgctgcattaatcaataccttagtcttcatggtcttacactcatggtggcataatgtgatggtaatttctaacaccatcgccttcatcgtctccaacctggcatctttctggtttaaccaaaaggctgtttttatcaataatgtcgatcatgaacacagcacgtggcataaactaatcgtctttttcacttatcgcgtcatcagtttaatccctgatacattaattatgttagtcggcttatcctggctgcatttaaacgcattactagtcaaaattatcgaccaaattttagtcggtgtattcaattacttaactactagatcagtctttcaaaagcaagaacatactatgattgaacgtgcaaaaatgcgcattcaagaaccaaaaaataaaagagacagcaaaaattaaacaatgtcattaagttaagacattgacaaattatcgacttggacttttaagatcattcatttgcgatttatcgcatttgaatgctcttttttcatgccaaataaacccaaatcttgtttagaaattaggctacacgatataaataatatacagctgatttgggtttgagatttcttttgtcttttcgtcctggtctgatcggaattgtgtaatgactaatttgaataagaatctttttaaagatttcagttgaagaagaaattatatacatagcctggatgacaaaacatgactgtttgaaattgatcgcatattgatacttgcattttttttgtggtacatatgcttgagcatcaatttgactgactgcgttaaacataatcatgtgggcatagatctccatttcaataaatctatcctgcttggaatgaaactgtacgctacctaaagcatatttcaactttttgaatgaagtttcaatgccccagcgcaaatggtagatttctttgatcctttttaagggataatcggctctatttagattagttagaacaacttcccattcttctttgcctgatttaggatcattaattctaaatttacaggcacgaaattttattgtacataactctccaaagtcccagctgccatctttggtatttttagaccgatattttatatattgacggtaatgatggttaaccaaatgaacgttttctgtagccttatgggtttcataataataattagaggtagtcacccagcaagctatatccttatcacactcttgattaggcaactcagctacttccttaaatgcgccatatcccgttttagtacgtatgacataataacagttaggcaggcgattacaattttcaatcatgttaaagccggtataacctcgatccatagtaactatatatggtccgcaatttagctttttaagcatttgaacggcggctttacgttcatccatctttgacttaggctgaaagatgcagtcttgataagtattatttaacaggtcatagagtgcattaacatgaatttggcaatatggctttcctttatgattgagatttccaacgatattctctgatttaggattccagatttgattaaaatcagacccatcaatggcaaatatacgatatttatgatcaaataactggatattaaataaattctgattaaatacagttagaatatgcttaaaacatgcgggtgaaagctgacctttgcgttggacataagcggaagtactgactactttatcgttatttttaatagctttttggccaaaagctctaaacaactcactggtcaaatcttttccttgcatattaatagtagttttaatgactgtagctgcatctaaaaaccgcttcctagtgaaggcatgaggatcatcgataaaatcatgaatatgctttccagtatcattgataatttgatcaagacgatctaaaatatttctgtgaagggctttcataattaacaccagctttctggcaataattttgaaggtttaataatttaatcagagggcgaaaaggtaggttcttttcgcctttattttatgcaaaaaaagaaccaaatcataatgattcggttctacagagattagattcaatttgtcaatgtcttaacttaatgacattgaaaaattaaaactgtctctttatttttttactcaaaatcttttggtttactttcactatcttgattaaagtaataataaatatcatccataattcgatcagctgcatgtccatctccatatggatttttggcattcgccatccgatcatattcgtttttgttttctaacaaagctagcatttcttcacgcaccttgtcgacttcagttccaactaacttcaaggtaccggcctttacgccttcaggacgttccgtcgtatcacgtaaaaccaaaactggtttacctaaactaggagcttcttcttgtacgccacctgaatcagtcatgataaagtatgaacgtttagctaagttatggaaatctaccacatcaagcggctcaatcaaatgaatccttggatcaccaccaagcacttcattagccactttttgtactcgtggagataagtgaaccggataaataatttctacatcaggatgcgaatcaattacttgccgcattactttaaatactcggcgcattggctcaccttgattttctcgacggtgcatagtaaccaaaatcaccttattaccaggagtaattgcgtccattacctcatgatgataatcttgttgtacagtctgtgctaaagcatcgattgccgtatttccagtaacgaaaataaaatcagaatggtgattttccttcagtaaattagccttactcaattcggtcggtgcaaaatataaatcggctaaatcatccgtcatctgccgattcatttcttcaggatatggtgaatacttattccaagttctcagacctgcctccacatgtcccaatgtagtttgctgataaaaagtagctaaagaagccgcaaaactagtcgtcgtatcgccgtgaaccaagacaatatctggtttctcttctttgatcaccttagataaatcaatcatcactttagaagtaatttcttctagagtttgattttggtgcataatattaaagtcataatctggtttaattttaaaaatatctagcacttggtccaacatttcgcggtgttgtgcgctaacgaccgttacttcttcaaaacgatcatctttttttagtttcaaaacaagtggtgccatcttgattgcctctggacgcgttccaaaaacagtcattaccttaattttcctcattaaaaaattcctccgcttaactattttactatacctgattttagactatcttgcacccgctttctgtgttttaatggaagtattaaattgaaagttggtcgatgcatgaattcatcattactattattaattacaactggtttaattattttgattggaactttttgccttgtttttggtatggacaaaaacagacccgctaaaactagaaaatatttactttatactgcactaatctgtgttttcctagtttggggcttaattactgcaattatgcttcaacccttaggataataaagataccttttggataaccaaagcatgtaaaaagcctgcaagaccaatacttgcaggcttatttctatgaccccggtgagattcgaactcacctctacggtttaggagaccattgttctatccagatgaactacggggtcaaacctaagattaactttaccaaaaaaagtggtaatagttaacctttttttagaattgtggattaaaaaatgttttcggatggttggtatcagcaatcttatcagctgctttaacaaaaggcatccaaattagcaaagtaacaatcatatttaaaatgcttaaaacaattgcacgccaatcataattgcaagccagaaatgggccaataactggtggcatgatgctaggtactgccacttgaactggattaaccaatcccataatgctaacccaataagaaaaggcaacattaactagtggcgctaatacaaatggaattagatacactggatttagcactacaggcaggcccaagagaattggttcgccaatgttaaaaattcctggagctagtgagattttggcaattgtgcgataatcactgcgtttagaaaacattaaaatcgccacaattagcattaaggttccaccagcaccgccaaaccaggcaaagacatcaaatgagccacgtacccatacatatggtggaatatttccattactaatcgctgtgatgttatcattttgagcagtcatccaaattgaatccaaaattggtgatagaacccctataccattaattccaaaaaaccaaaataactgcactaataaagtaatgacaattaccgtaccaaagccttgtccccactttactaatggagtttgaattgtggtaagcaaccaatttccaaaatatttaccggtaagaatttggaacaaataattaattccgcctacaccaaatattgcaatcattgcaggtaataaagaatcaaaagcagcttgttcagcatggggcaagttcgatgtcacatgcaacataatccttgctttatagcaagcataataaataaaaaagcctaatgagccaaacaaaatagcagtaaagaggccagtagttgagaactgactaatgtcaaatgcattatgcagtgtaacattatcaccatgaaatttaatcttagctatattggcaatgcttagtgcaaaagaagataatgccacaattgaagcagcaagtctatttccttcaaaagcttttgctagttgatagcctaaagccaatgctaagaaaaaggcaaataatgaaaatgttcctcgccaaactaaattactgattgctaccaatggctgtatcgcaaaagcaaaggcataccagcctaaatgatcatgagctgcttcaattaagctcttaattaaaactgctaatgatcctgccattgtaattggcattaatgagacaaatgcatcccgtaaagcaactagccatcttatctgaccccatctactagctagcggcaaaacatagtcctctagccatctaactaaacgaatcatttctttcctttcaagtaatgtggatgatatcccttgttcttattacgtttcttgcgttttttagttttatttttcttagtcgaagtcttaatgggctgctctttagcctgcttcttttccttcttgagtttaggcttttcagttgttaaatgatagcctgcaaagtagacacgctctatttgtaattgatctgccaataatttcttcaaatcacgaaaatcgtgatcatcgcctaaggtaaccacataaccttcagcgttcattcgacctgttcttcctgcccggtgcatgtaagtattagtctcgctcggaatatcaaaattaatcacataggtaaggcctggaatgtccaacccacgcgcagccaaatccgttgctagcagcaatttcgtcttaccagtagctaggtcatttaaggctttttcacggcgttctttaccaaattcattagctaataattcgaacttagtcttagtatgcccaaaaataccagcaaagcgcatcatcgttttatttgaatcaaagaacaaaattcccttaaagtgatccaacttagtcattcgctgcaaaaattcaatcttgtgttgattgtctacttgcaaaaaataatgtttagtcgctgaagcttgttcatttctgacatctactaacaagaaatgacggttaaaaacttgctccgcatcccgtgtaatctcagaatctgttgctccaaataataagatttgactgtctggacccagattttgccctaatgctgataacaattccattttagtaaattctaaaatatcatcggcttcatcaataatcaaagtcttgatctggtttactttaattcgaccacttgagaagaagtcaaaaaaacggcctggtgtagctacgaccacttcaggatgctttttcttcagattgtcttcttgtctctttctattgccagcaccaaccaagctgacgccttttaatcctaaagcgtggatgtaaggattaattgcatgacgaatttgtacagctaattcagtcgttggcgcaataattaccacgctgttagcattacctggctgtgctttttccaaactaggaagtgcataagccaatgtcttacccgtacctgtcttagccaatccaaccaggctcgcaccattgcgaatggcatcatagctttctttttgaattaaagttggctggtccttgtgttctctaattaaaacttgtttgattttttcttgatacattattactgtgttaattgcccatacttttgcttatattgaccaacggtcccgttatacgcgtacatcgttacctggctttctaagcctgaaacattccttacgcgtccgttagtagtgtagcaccaaaatgaatactttaatttattcggtgccttactatctgatgacataaataacgtttgcggattaaagtaatgttgatatttatgatcaactttcaccatgactcttttgccagctgcttgcaataaagccgcaaactgccccattgaccgcaaatatctcgctgaacgagtagtcactgccggtacaattagaattggcagcgagcccgtattttgtcctacttgcttaaaaaaagtagcggtaatgctgcatcggagtcgattcattgctataggaaatctcactaccaaatgccaagttcgttcctaaaatttggtcacgataagacagatagttttcatcaaaatatgatctgccttgggttgctttcaaatatataaaggaaacgccattagattgcaatttatgtaaatcaacatagtcaatatcttgatttaactcaatcccaatcgcacttgaattagcatctggcggtaaagttgtttgccgcttaaaattgaaaaagccaatcaaaagaaatgcaatcgccagaattaataaagtcaaaatcgctggcaaagtatacttatgctgaaatcttttcatcggctaaattcctcccttaattattttaaccgaaaagcctatcaatacaaaaatttccgagactgtaaaatagtttgtgtaaggatgaatgattccttaaatttatttctttaaacattagaaaaaggagttcctttctcgtatgattggtttgaacaaaaaaaacacatacagaaagaagaactccttcatgaatgattttaccaaagattttgctcaagctctattcaatccagacaaaataaatgatttattgcgcaaagagctacaacaggctgttaataacttgctagaagctgagttgactgcctttctaggctatgatccctatgccagaaatggctggaatactggcaattctagaaatggtgcttatttccgcaaggttgatacccagtttggaccaattgaagtgcaagtgcctcgagaccgcaacggtcagtttcatcagcacacgctgcctgactacaagcagcactctgatgttttggaaagcacgattatcaagctctactccaaaggcgtaactaccagagaaatcgctgacttgattgagaaaatgtatggcagtcattatagtccagctcaagtatcaaatatttccaagcagatgctccccaaggttgaggcttatcacaagcgcaagctaagcgacaagtttttctgtgtctatttggatgcgacataccttcctttgcgccgagaaacgtttgagcgtgaagcagtatatattgccattggcattaaacctaatggacataaggaagtcattgactactgcattgctcctagtgagaacattgaagtctggacagagatgcttcaaaacatgaagtccagaggcttgaagcaagttgaactctttctttctgatggtgttgttggcatgaaaacagccttggccaggacttatcctaaagctcattttcaacgctgcctggttcatgtcatgcgcaatatctgtgctaaagtccgggtggatgaccgcgaaaagatcatgaacgaattcaagcagatacatcaacagacaagcaaaaaagaagctgcagctgtcttgcacaaattctatgccagatggaataaagcttatagccatgtcatcaaaggtttgaaggaaattgagcccgatctgctggtcttctacaattatcccaaacaaatcagagcttcaatttattcaaccaatatgattgaatcctttaacaacgtcatcaagcgtaaagctaagcctaaggcagaatttccaactgaacagtcgcttgatgcatttattggcatccaggcaatgagctacaatgaccgctatttcaaccgaattcataaaggctttggtcaggttcaggataccttagaatcttattttgaataaataattaaaaaatcaatttacgagaaagaactatttacacaaaagatttgacagtttcaaatttccagtcgatgtgctaaaatttaaataatgtaaacgaagggcaacaaataaatatgaaacgacaaatctcatttggccaagcattggctaccgtagtcggttctgtcatcggagctggcgtatttttcaagatcggaacaattactgcacaaactggcagcacttcaatgaccctgtttgtatggattttagctgggatcatttcaattgcatcaggtttgaccatttcagaaattgccgccagcttaaaaattaatggtgccattaagtatcttgattacacttacggccgcgtgtggggttttctttttggctgggcacaaatgattgtttattttccagctcaaattggtgccctaagctcaatttttggcgttcagtttgtctccttatttggaattaaggcgaggtattctaacctaatagctatcttgctagtgctttttctcttaggaattaatctaatcggaactaaattttctagcaaaatgcagtcggtcatcactatcctaaaaatcattccaattgctttaattattatttggggattatttaatcctgccaaaataaatacctgcaccaattattccgttaacagtcggcactggacattcatttccaaccgccattagtcaagggttactttctgcgttattcgccttcgaaggctggattgtagtgactaatttggctaacgaagtcaaaaatccagaaaaagacctttcacgggcaattattttaggtctttcagcaattacattgatttatgttttaatcaattatactttcatgaccgttttacctattgatcaattaactaataacaataatgccgcgtttcaagcttcaatgaaattgtttggtcaatttggtggaaaactagtcactgtgggaattttaatttctgtttacggtgcggttaacgcattcatgctgacagggatgcgcacgccttatatcttggctcaagacaatttattgccattctccaataaaattggcaaggctaatatccataccggtgttccagtagttggcgcgtttattgttgatgctattgcaattgtcatgattctactaggtaattttactgttttaactgacatgctagtcttcgttatgtggactttcaacacaatgttgtcagttgccgtaataattttgagaaagcgtgagccagaattaaaacgtccatttaaggttccatggtatccgatcattccaattatttccgtgatcggtggtatcttcatcgttgtctcaacaattatcaatcaatttgttctttcaattattggtattggtttaacattgttaggactgccaatttactattacatgcaaaagaaaaataattaacgaaaaaagccgccgattttgggtgactttttatttgagtaaatatatttcctgaattgtcaaattaagtgcaacagttaggttatgaagagatatattgcttgaagagtttctctgctgtgtgatattggaggattcggcgatatttgtggttaatggcatcagttgcctgttgaacataagcttttgacttgtctttcatgctcttgctcttagggaagaattgacgcaaaagaccattgcagttctcattggtgcccctttcccatggagaatatgggtgagcaaagtaaatctggcagcccttgatcttggtcatatccgcaaactcagagccattgtcaaacgtgattgatttaaaccaggcaggatgtctgtcaatctccttttgaagcagcctttggcatgtgcttgcccgatagtcaggaatcttgataactacttcaaagcgtgtggttctttcagtcaaagtcattaaagcaggctgattcttgcgtctgacgcctttaaccagatctccttcccagtgcagcggagcttttctgtcttcaatctctttaggacgctgttcaatggaattgccaagatgcttcttgtgcaaagcgtgaccgccatggctgtgatgacgcttgttcctgcgtcttttgagcttcataggcagatcaatattgcttatgtccagcaagccctgatcaatatagcgatagacagttggtgtgctgggacaagggtagcctggcatagtccttttgaattcaccaacgaactcatcgatgctggtggcatcaaatttagctttaaagcgtctggagagcattctcaaaaagacagcataatgcttcaatggattgcgctgatagcagtttttgcgacgcttctcataataaatctgtgcagtatcagcgtaatagtgctcatacaataaatagctgctgtctctttgcaggacacttccgcgtttgatttcgcgactgattgtcgacttatggcagccgacttcttgagcgataacagtacgggaagttatgccggaatccagcattgcttgaatttgtccacgttgtacgctggttaattgatgatagtgcttagaaatgctagaatttgaattggtcataaagatcttcctttcttgatttttcgtcacttcaagtttaggtcttcatggcctttttgtttaacacttagtgttgcacttcaattttaaatccggggagtaaatatatttattaatgttgtgaagcaccgctagttgcatcattttcttgatgatcttcataggcagtattggcagcaattcgaccaaaagtgaaaatatctgccaaggagttaccacccaaacgattaccagcatgaatgccaccagcattttcaccagcagaatatagaccatcaataatttgaccatctttattcaaaacatgtgccttagtatcaattactaagccgcccatagtgtggtgaatagcaggctttctcggagtagcatagaatggtgcaacttcacatttgaggcctaatacattcttatggaagtctggatcctcgccacgatcaacgtaagaattataatcctggatagttttaaccaaaactgctggattcattccaatttgttttgccaaatcttcaagcgtatcagctctaaacaaggttccagccttaacttgcgcatcaagtaactcttgggttgtattgtaagcagtgtccttaatcttatcgtccgcaatttgataaatcaaaccaccattttcgataactgccttagccaaaacatcccgttccgcaaattcattaacaaacctcttaccctttttgttaaccataatatagttagcaggcggagttacaacaccagtgaaaagctcaccggtctttggatcagctactggcattaattggataaagcccataccgaataagtctgcaccagcttcaagacctaagttaatcccatcgccagtaattgcaggtgaattagttgttgtactatcgtactatcgtctgcaatgtttggccaataggtattgtatttttgaaccatcttagtattggcaccaaagccacctgccgttaaaattactgccttagcatgcacagtcaaagtactaccgtcagcgcgtgtcgcaattacaccgcgtactttgccatcttcaataattagtttttcaacacgagtttcaagatatggatcgacaccatgctctcttatccaatcacccaaaacgtgaataaaggcataacctaatggctctactggcttatgacctctgcgccacaaaccaccaactggttctgtaacttgagaattatcaaacttaacacccaaatcttggagccatttaacagaatttaaagcattagttaccaattcatgtaccaaagcatatttaccatgaatttcgttaccttttaaatcagtccttttaccacctaaataagtttgaatttcatggagtaaagtcgaatcaaataaataatctgtaccagaatcaatatattctttgatttgtctttgtaatctttcaaaatcaaagcggtattctaaatcaatttgttcaattggcgtattagccaagtcttctaaagtctgtttttcaccaggaagagccttaaatttactttgccattctggttcagccgcattcattggaccaccagcacggctagtattaccaccgatctgtggatacttttcgagaacagccaccctttcaccatgttgaattgagcgaactgcagctgctagaccagcgccacctgcaccaactacagctacatcaacagtaatttcttcatcttctacctttgtagcagcgggcttttcacggtttttccattcggttgaatcgccgcctgcttcatcaattgcttcggctacgccatcaatcacaccatgactggaaatagtcgcgccactgaccgcatcaacgtttaaagtttgattttccacaattgttttaggcaaacgtctaaatacttcatcggctactcccttagtttcacctgatgaatctactttgattgaagtaactttatcgccatcaatgtcaacttccattggcattgattcggaaccatgacctttagcttttacttgatattttcctgacttcattgcttacacctctaataagtttaattttatccacaagttaatattagtgcgtcatctgttgatgtatcaaatatcaatttcactatactttcataataaaattgttatgagataactatgtttcgttctccaaataaaaaaagcttaatgcaaatagttatccacattaaactttttaattgcatgatttaattaataaactgaaacttgaaagctaagattaacgctccttccccgcgcctcttggctttttcttatcaaaaataaaaacgcaggatctctctgcgttatactttaagtgtcaacctgaaaagtaaaggagatcctacgcaatgaacagtatagaacaaatcgacacagaaaacgataccaaatccttaatttcttcatttattaatctaattggtctagctaagttgactaaacaagtcaactttaagcgtaaatctaccgtttcattaaccatgattatctcttggctgatgtctgtacattttgctcggctttccttattcagagctaagagtgacaagcgtttttccgttagaactgctcgcaatgtacttaacgatggaagaatcaactggcaaaaactattatgcttgattgcagctcggctcattggctgcttcaaacatccgtaaaaagaaacattatctttattcaagcatagttgaggctcaatatcatggacatatctttttattaaagctcgtttttgtctccaaccgtggaaacaagaacaagtatttagttttagctactactcagacaaagcttagacctaaagaaatcatccaactttatggtcgtagatggcaaattgaaacatattttaagacgtataagcaatatcttgctttagataaatctcaagttcaaagctatgatggacaatgtggctatatcgcagttacagcaataacttatgatctattggcctggcaggaaagacaaaatacagatgataagacaatcggagatttattctatctaatgaacgaatccttacctgatattagattcgtagatgcattggtctacttaatttcagaattaaaagagcttaaacagaatagttttgaaaagatagatgaagtaatcaatgactttattaaccaactgccacgattcatacaaattgcactgaaacagatcatataaaaactaattacgtctagaaaagctcaatagtgacaggacttgagcttgattttggtgctttcaagtttcagtatttaaattaagcttcagaggcgcctgatacagcatctgcttcttgttcatttgaaacagtaaaataattataattggtattatccgcagcagtcgtacctgcaacaaaaccagaagcatagctccaagaattcatcatacttggcattgaatcatgaccattagcaccaccaacaatttctcctgcagcatagaagttacttacgggattcatatcattgtcaagaagctgcatttgatcagtagtttcatatccacccaaagttgtgcagaacagaagtttttgttcaattacataatatgtatcgccttcgaactcatgcataaacttcttgtctctaccaaactcaggatcataatctgctttaacatcttcagtatagttatccacagtttccttcagcgtttgataatcaatacctgctttttctgccacggtcttcaagtcgcctttgaccagaactggactcttctcgccaaccaaatcaaagaatgattgaacctcttccttggtaaagccatacttaagcattaattcatagaaacggtcccaggttctttgatccatgacaatgtaagctaccttacccttttgttcagcaatcgcatccctaaaatgcgtataaggtgcagattcgttaactattctcttaccatcagtattaacaaaaatagcccccatatcggtcgcttctttagttgaataagttgttagcttagcaataccaggttcaacttccaatccatgtggatataccttataccagtctaagttacgagtaaccaaattcatatttttggcaaaatcaagataatcaccagttgaagtcattggaccataatatggaatatcagtcttatgagcctgataatcacgtgcaccccaaccaccagcagctaaaacaagtgacttgaaattgacattaattgtctggtgcttgccttcagcggttaaagataccagtttgccagccttatctttattcaacttttcaacacgggcatctaagataatttgtccgccctttttttcaaatgcctcagccaccttagtcactagttcatatgagctttcactaggcatttcaatttgacgatatacactatgttcaactgtttgggtttccgctttttgataagtcaaatttgcaaattcagtaataaagtctactgccttcccaatattgttagctaatagctttgacaacattggataattagtaccgcggcattcacgagtaatatcttgaactagtctatttggcgaatccttctttgccgtttcaccaaataattctgcagaaactttagagccagttcctacaacatttgagccatttaaaatagttgctccacctaaatagccatttttttcaagtacaactacttttttacccatcgaaagagcacgacttgccgccattaacccggccataccggagccaattacagccacatcaacatttagttgcctttcttcatgtacgacttctggcttttttccgtcaagagcaatgttattttcggctaatgcttttttaccagaatctagcattgcttgagtcatcaatgatgccccagaaacagcgtccacgtcaaaactttgattatcaataatatttttctttaatttaccaaaagtttgattaaaaattgcaggagtttccgaattcttggttactttgacatcactaattttattgttttctaagtcaatctcaaaatcaatttgaccattgcgaccatctgcttgagctttaatagtttgtttggtcataaaaactactcctttacttgttctttttactaaaccgcttatattataaccacaatattaaatctaaaaaataaatttaatttgatattttaatagaatttttttatcaaaagcagtaaataaaagcgagtgatcattctcactcgcttgattctttatctaattttcatccttatttattagcgtaatgttgaataacttctggcttcaataccccaacataaggaaggttacgatacatatttaaaaagtccaaaccataacccactacgaattcattgccaacctttgaaccataatattctaattcaacatcggtagttcttctggcttccttatttagcattgcacaacacttaacgctcttagcgccacgtgccataatgtgttctttcatgaatttcaaagttaaacccgtatcaacgatatcttcgacaattaaaacatcgcgatccttcacgtcagttaccaaatctgatactatcttgaccttaccagttgactcaaagccatcaccataactagaaacatcgagaaaatccagttgatgtgctacgtccatttgtcgagttaagtcagtcaagaagtaaattgcacccttcaaagccccaacaactaccggctttttaccagcatagtcctcagttaattgcttacctaaacggacgcacatctcatgaatgtcatcttctgtgaataatttgtgatctataatttggtcaatattgtcgccttttgccatttaatctacccttcaattcaatttacatatattattcctaataaaaagaattataacatctttaaacaaaaaaagcgtcattttcaacgcttcctctgaataatttctaattttcatcctttgattgatcgtctttttgatctttatccttaatcggttcaacgataaaccagcgcataaagccttgttcgatactgtctaaggtaaacttatatccttcaagttcaattgattcaccctttttcaagttaggataatgttccatcatgtaaccaccaatggtaataatatcgctatcttgaaaggccttcagatctgtatggaagaaacgctcaaagtcatataaagtcgtcttacctgaaacatgaacttgaccatccttgtccttgataatgtaatcatctgaaacatcatcaatttcatccttaacagaaccgaaaagctcttcataaatatccttatcagtaacgatcccactagtaccaccatattcgtcaactactaagacaattggtgtgtgcttagaaatcatcaagtgcaagatatcttgaattggcattgattcaggtaccgtgataatagttctaataattcttgttactggtacgttgccatcaatttggctttgttgcacaatgtcgtacgcataaacataacccacaacgtcatctttatcattatcacgcacaactggaaaacgactgtagccttcttccaagtattttttcaaggcataggcaattgtatcagttgaatcaagtactgacaatcttgttctgtcagtcatgatgtccttagcaaccttatcgtttaattcgaaagctctttccatataagttaagtcttctttatcaagcgaaccaccatgaaccgcattacgcgacaacttgatgatttcagattgtgaataaacttcattttcttcatcagctggagtaaagcccatcaattttaagattccattggagctagtatttaatagccaaacgaatggataaacaatcgtatggaaaatatgaagtggcgtaacgatccccatcatcatcggtactggcttgtcaatcgcaatattcttaggcacaacttcagttaagacaacttccaaataagttaataaaactacgcctaagattgcactaactgacttgatgagtgaatcattcattggcgtcaaatggaaaagatcttccaatatggttgcgaatgtatcagccgagaaccaacccaagactacaccaaccaaagtggtaccaacctgagtagttgacaaatactcattcaagttgtgcgtcatatgcaaagcacgacgcaactttttcttatttccttgacccttagcaagcatatcttcgagctgacttggtctagtttgaactaacgcaaattccgcagcaacaaagaatgatgcaacgataaatattaataatgttgcaactaaattagttactatttgagctggactcaaagtattatcacctttttttacaaatatattactaaaacctattttaccatttcttgcctaaaatagtgcagttttacacaagggataacggttttttgtaatttattcgaccaccttgtaaatttcattaaacggtacacgctttggaataaatttaggatcattaatttcagcattcttgtcgatatagccaactgcaattgccattccgacagcttcatcatctggaatttgggcatattctctaaccaattctgggtatgaaaccattgagtgagctggcatcacacctaagccacggttaatggctaaaagcatgatactttgtgcaaaaattcctaagtcaaaaacggaccaagctggagatttcttcggaaccgttaaaaagataattgctggtgcattgaacattgttttattcgcatcattaaataattgaagcttatttctgaaaaagaaactttgggatgcacccatcgtagccatattacgacttggataagtatcccaatctagtgatagcattgaagcaaaatcttcatgtgcaacttctttatcatcaatctttttagctgaagcagccttaaacttgcttaaagcatcccccatcaaaacatatgcacgccatggctgagaattaagcaatgaaggtgattgctgtgccattttaacgattccagcaattgttttttcttgtaattttctattagtaaacttccgcgttacatgttccttttcataaacatccttaaaattcatttttcctcaattcctttttgcttatataataacaatctatattttattatagtaaaaaactgttaaaaagcttaattattgctcttttcttgctttttcttttctgctgcctgtttttttaaataagcactcattgcaagatcattttttcgcatagcaataaacgcagtaatggttaaagttaatccgccaagacaaatcacaagtaagccaatcggaaacaagaagtctgctcccttaggaataaatgatgccttaattacccagcatgctataccaattaacatcaaaactatacccacaatgactgccttagtgttcggtcgatatcttttcataaatgcccttctttcttaattaacattctaacagaaaaagcttagcttcaacgtagaagctaagccgaaaactagagaaatagtcgttaaatttttacatgagagaggggaaagttgactatttaagttcgatagtttgtactttttgggaatgttcaacactgcctttttcaatcggagtaactgacttaatcaggtccatgttggtgtagacaacgatgcagctgtcatcgtatcccttgtctgtaatcatttggaaatccattgtggctaagggttgacctttcttaactttatcgccttgactaacattcactgtaaacggagcaccttttagttcaacagtatcaagacccaagtgaatcaaaaactcaataccttggtcattcgtgataccaatagcatgtttagttgggaagagtgtggaaatactaccatcaactggtgcatagatatgattatccttaggcttgatagcatagccatcacctaacatcttagttgagaagacatcgtcttttacatcagtaattggcataatgtcgccgtcaactaccgcatctacttcaatacccttattctttttcttaaagaaattaaacataattaataacctctggatttctaaaattcaagtaataatatcaacataaagcttgcgagtaataaaccagctgcagtaagtgaaattgcgattattactcgactaacgccatcttgtgtcttcttcaaagctcttgctcgataaaaacctaagatagctaatactacgcaaagcaagttgccaacaaagagctgagcaatcatctgacttcccatcaagaagcgataagtctgtcgattgattaaaaactgcttgtggtttaacaacatatagtagcctagtatgaagtcaacgatagcaacgattgtactaatcgcaatcatcggctgcttcataatcatcatccgaatcgattgaccagaagcaccgcttcgtagtgcaatcatcgcccaaaacaatagtggagcaatgaaaagtacgtatgaataccaagtcaaaatcttcttagtatccaagtgcatgctttcggttattcgatcgataaagttgccaacttttcgtttactaattgcccacattgatctctacatcctctccttgactctgttgccaagctacatattcactaattaccaaatcaattaagaagtacgctggggtaaaggcaaccttcccgctcttaaagtcggcatcatcagtaaaggcaatcgttggaaaataaatgttgtgctgcactaatgaagctaatttattttgcttcaggttagtgaacgaaacatatttgaatttatcattcactagttccaacttagtgatttcctcattgatcgttttattatcacccgtaaacgagataataaacaaaacatcgcctttttgagcaaagcgtcccgcagcttttaactcctctaatgctgatggcaaaacagttgcatgcttgccaactacaaacaattcatgagccaaatattgtgcgattaactcttgttgccaaccagtagagtaaatgtaaattgtccctgcattatctaaatcgcgatacaagctattgaaatcacgttgtttgaaatacttcaacacgtctgaatttactttactaagttcccgcgcaaaattattttcaattttgattggtttttgcttcgattcggctaattcgaccaaatcaaatttaagctcactgtagccacttagtcctagctttttacataaccggaaaattgcggattcggatacataaagctttttagctaatttggctaagcttaatttgctacagtctctcggattatttagaacatattgaactatctgtttttcagaatcattcaacttatgactattgtcatagaccattgatctcaaatttgccataatacctgtgcccttatcaatatataatttatatattaatgataacacaagcgctttcagattatagcaattgtttcatttgatcaacaacttgatcggcatccaatccgacaacgatgtcaacctcgttgttatctttatgttgtacttcgtaagaatctgcgatcttcttgaattctgaatctggagcgaccttcttaggatcaacgacatgagttcttactctagttgagcaagcaatgacatcttgaatgttggagtcaccaccaagcaagtcaacgataccagtagctctttcaatataaggattatcttgttcagttgataccttagcgtcgccaccttgttgttgcattaaagtgttcatttcatcaagaacttgaggtacgtccaaacctacgataacttggatagccttaccgtggtgtacgacattgacagccttgtttgctttaaatgcggcatctgaagcaactttatttggatcggcaacagatacacgtaatctagtagcacatgaactcaattctgtaatgtttgaaggaccacctaataattcaaggtaagcagttgctctttcaatgtaagggtcattagcgtccttaccagcagcttctgcagccttcttagccttgtattctttctttgaaagaaggtgaacatcttgatcatcggcttcacgacctggagtaatgtaattgaacttctcgatcatgatcttgaagacaaagtaagtaataataccgaagataataccaacgataaattccatcacataggtcttccagtggtttggccaaagtggaatccagttcattgaagcgataccgatcgcaccatctgacatgaatcctcttaaaccaaaggcccacataactgtgttcatcgtggctgacaatactgagtaaactacccaaagaactggagcagcaaacaaataagtaaagtcgataggttcagtaataccagctaatactgaggttaaagcagctgggataagcaaagctgaagtttgcttcttcttgttcttcttagcagttgcgtagaaggcaagacagataaatggtactaagaataccttttcgttaccgtaaagttggaatccttcaactgaagcgatttgtgaaagtggtttagtacttgcagcgtattcagcaaggtgtttcaaccagtatggttgcaaaccgccggcaacaacggctggaccgaattggaatggaatgtataccaagtggtgaagaccagtaggaatcaatacacggttcaagaattggtaaatccaaacaccgataaatccactatctacgatgaagtgttgcatgctggtgatacccatttgaacttttggccagccccagcaggtaatgagtgctaaaggaatcattacgaagaatgctaaagcgtagacataagttgaaccttggaaagtaccaagccagtctggcaacttcttatcaaagtacttattgtgtaaccacactacaataagagcaacaaccaaggcacctaagatactagtgtcaagagtcttgataccagcaatgttagttaaaccatggttagtagcgttagcaacaatttggatcttgtcaaagttaggaataccaaaagctgcaccccagtgggtaagcattgcaccgatgaagtagttgtaagtcaagtaagcaataactgcttccatggctgctctacctctagccttgttggctaaaccgattggcaaacctacagtaaacaaaataccttcttggttgaacactgtccaaccaccagctgaaattgtgtcccaaactgagttccatgtagttcccgggttggcaattaaaccaaacagagtcgggttattgaacaaactacctaaagctacgacaatacccgcaaacgagaacagcataactgggacgaacatagcggccccaaaccgctgtattttctgcatcataatcgtttacctctgaagaaaaaaattaaatcaataacttattcttacatctacacctgcatctacatctttatttcatcagatcaagtcaaccgcaaggtgctcatacaattgacttttgccatttgtgcttcacacaaatatttactcctcaaaaatgttttaagataaaacgtccagttgatatcaaattctgaacttaactctatcttagtagctagcttacatttttatttataccatagttttaagctaatgtaaacgttttttaaaactatgacttattgtttcataaagttaagattatatttcatttcatgaaacgaaacaagtgataaaacctttttcctttccaagatgaactactttgcttactgaaataacacaaagtctggcataattaacggtaagttaaatgcacaggaggaattattatgacaatcaaatttattgcacttgataccgacggtaccttgcttaattcaacaggtaagattttgcccagtacaaaaaaggcagttaaaacagctttagaccaaggaataaaagttgctttatgttctggtcggccaatcgcaggattaaaacattttatggacgaattaggaattattggacctaatcaatatgctatcactcttaatggcgcaattacccgcacagcagatggcaagataatgactaaagatctagtttctaatcgactttatcgtaaaatgtatgcttttgctaacgagcatcatttaccttttaacgttgtttcccctgattcaaaaataattacaggagatcatgatgttgatttaatggtttatactcaagcttacgaaaatagtgcgactttatacattagagagctagatgaattgcctagtgattttgaaattgctaaaggttgttttgccactaaagctaagttgttagaccaatgggaggataaaattcgccaagaatttgggcaagagctgtatattgttcgtgccgacgattgcttcttagagctacttcaccctaatgttaataaaggaaccggattaaaagaattaactgaaaaacttggcattactccagaagaggtcatggcaattggagacgaaagaaatgatattaccatgtttgactttgctggaacagctgtttgcatgggtaatggctccgaagaagcgaaaaagcatgctgattatgttaccacttcaaatgacgaagatggcatcagcaatgcttttgagaaatttttatgaacaacctaaaacaagtatctgagaagtgattaatctttcctagatacttgttttattatttgttcaaatattcacgcaaagctggcaaaactttctccgcctcaactcgtccgacctcatacactcgtcgcatctcttttttatctgtttctaaagtgccaatttcaagcggaaacggtggacgaataataaaagcttggtcagcagcttcatcttttaccatctgatcaagcaccgcattataatcctcagctttagtagccaatttttttactactgcggggtatttccttaaaattactttttccagtggatagagcttactctgctttttgcgataagacttcggctgtgtagcaatgactacctttttatcacagttttgctgctctaaaaaatcatacggaattgaatcagatacaccgccatcaaagtaataatgcccatgaattgcaactggatgagcaaaaaatggaatcgacgacgaggctctaatccactctaagtcaacataacctgcatcatgtaattgatgataaaccggctcacctgttgcagcatcagttgcaacacaccaaaagtccattggattagtcataaatttttctttatcaaaaacatccaacttatcaggcaaaatatggtaacaaaagttagccgcatacaaattgcctgaccgccgccatgatttccaactagcataatatggtttccccgcaaagcgcatgttgtagcgcaatactcttcccttttgctccgacttcaagtttacgccaaaggcagcaccggctgaaacgccaattgctaaatcaaaggttatgtcattttctaaaaacacatcaattacgccagctgtaaacagcccacgcattgctccaccttcaagtactaacccacttttcatattttccctctttatcaaaaaagacctacgcttttcgcataggtctaatttattcttattttaattttacttcaagcccgaccattgccattcggttacttctggcatgtctttaccattgtcgcggatgtattggtggtgcttttcaagcaagtaatccatgtgactgatgaagtccgcattcttgcccttcaaagctgggatgctttctacggcatccttagctaggtcaaagcgatcaagatgattcaatacccgcatgtcaaatggggtagtaatatcaccattttcttcatagcagtgaatatgaacattgtaacgcttgcgagcaaaccaaatggattccatcatgctcttgtagccatgccatgcaaagattactggtacatccttagggaataatctgtcaaattcttcagttgacaagccattcttgttgtcctttggatccattaacttcataacatcaactacgttaatgtagcgaatcttgagatctgggaacttcttatgcaaaatatcaattgcggccaaagtttcaatagttggctcagtttcagttgaagcaaagacaacatccggcttagcacccttatcagttgaagcccagtcaatgtagcttaagcccttgtcaaccaacttttgtgcttcttcaattgagaaccattgtggacgaggctgcttagaagttaccaaaacattgatgcattctctatctttcaaggccttatcgccaactgccaaaagcgtattagtgtctgatggcaagtattcatgaacaagatctggacggttcttttcatacaagtgagtcaagatgcctggatcttggtgagtgtaaccattgtggtcttgttggaatacagttgaagttgcgacaaagttaagtgatggataatcatgacgccagtattgttccttagcctttctgagccacttcatatgttgagtaagcatagagtcaactacccggccaaaggcttcataagtagcgaagaagccatgacggccagtcaaaacgtagccttcgagaaagccttcatcttggtgctctgacaattgtgaatcaattactcgaccgctaggagccaggttttcatcatttggttcatgaatctctggttcccattgccgcttttgatcgtcaagcaattggaacagacggtttgacttggattcatctgggccaaagccgcggaaagtagttgggttgagcttagcaacttcatccaagtacttagcccattcaaccatgtcttgtgcctccatagaacctggcttgtcaaacttcaaagcaaatttgcggtagtctggcaagttaagccgcttaggatcaagaccaccgttagtgattgggttcatggccattctatgttcacccttagcagtgttttcagttacgatttccttaggtgaaccgtcttcattaaacaattcttccggcttgtagctttccagccaatcagtaagcatatcagcgtgttccatatcgccttgagcaactggaattggaatttggtgagcacggaagctgttctcaattgggttgccatccaagtccttctttggaccagtccagcccttagggcattggaagataatcattggccagtgtggcaaagtagcgtcattgttttcacgggcgtgcttttgaatagccttgatttcttcaatgacttcatccatggtcttagccatttcttcgtgaacctgcattgggtccttttcaccgtcaaaacgaccacccttaaagactgaaacaaagtgaggatcccagcccatgccacggaagtattcggttaattcttgatcgctcatgcgagaaacaatggttgggttagaaatcttaaagccgttgatttgcaagattggcagaactgcaccatctttaattgggttaatgaacttgtcactaaaccatgaagcagctaagggaccagtttcagcttcaccatcaccaatttcaacagcggcaataacatctggattatccaaaacagcaccagtaccgtgtgacagtgagtagcctaattccccaccttcatgaattgaacctggagtttcaggagcagcgtgagaagcaacaccgcctgggaaactgaagcgtttgaatagcttagccatccccttttggtcctgggtaatctctgggtaacgttcagtatatgaaccatcaagatatgagttagaaaccattacctgaccaccgtgacctgaaccctcaatatagaacatgttcaagtcatacttcttaagcacacgattcaagtgagcataaataaagttctgtggtgcaatagtgccccagtgaccaattggcttaggcttaacgtcttctgcaaccaatggggtcttaagaagagggttcttcatcaagaacaactgaccaactgacaagtagttggctgcgcgccaataagcatcaacgctctttaaatagtcttttgagtcataatcaactgccatcttattctcctttgagcatctaagagtgctctttttcatttgttcttttgtttacacttatatcataccaaattatctaaaaagttcaactatttttataattggatcctaccaattaaaaaataagtatttaatttaaaattgcatcccttttttgttgctatatcaaccttttaatgctttgatataagtatttagttgcttaaatactgataagtacagataaacaaatatcaaatactgacataatcagtgcaaaattattcattcatgttagattactaaatggagggcatgagatgacccaagaagaaagattaatacaaattaaacagttacttaaaaaaaagcaccaattatcaactagacagattgcagctcacttcaatgtatcatttgatacggcaagacgagatgtaattcatctaactgaaactggtcaagcaattagagttcatggtggtttgatggaaattaattgcaacagcgtacctgattttttagcaagaaatcaagtacaatcaccggttaagatgaaaatggctagaatggcaaagagatttgttcatccaggtcaatgtgatttcatcggttcatcaactacgttaaagcagctctgtccaatgcttaatggtattgacatgcagatcgtcacgaattcaatcgacaacgcattaagcttattagcaatagaaatcccatcagtcagattgttgggcggcgttatcaacaaaaagcagcgtttcatttattctgaaacagcattagaaacattgcgtcaaatccatttcaatactgcatttattggtggatctcgaatcagagatgacggcgtatatacaccaagcatggctgattccaaaattgtcgaaaccgccgctagtcgcgctaatcaagttgtattagttgccgaaaaatataaatttactaatcaatcctcttcgccatacatgtctgtccccctcaatcagatcgatgtccttattaccgacaccccattgcctgaggaattaaagcatcattttaatccaaaaacgcaaattatacctgttttaaaggagtgatagttatgttcagtctctttaaccaaaagaaacaaagcgaaagtcgtgaagtataccaagatttgaagaatttttataatagtttttttagcaatatctacaatgaaatgaatattggtcgctatcggcagattcgcgatgcaattgggcttgttcttaataagttcgacagtggtgatcatcctcttgaatacactagcaaattggtcatgtatattcaggctcgaattgccatgaatcacctgcatctaactcatgaacagcaagacctaatgaaaaagctaagtgacgctaccaaatatgtaaatctttcttatgtttatctgagtccgctcacttcggtagaacaatttgttaatatttaagtgtatctagaacctgctctagatgaaaaaatgaatccaaaaagaccgagtagctgatctgctcggcctttttatgcaataatattgttaaaagatatagattttttcaaaggaaataattatgacaaaattaccattcaaagttgttgctgtcgatatggatggcactttcatgcatgatgatcaaactttcgatcacaagcgctttgaccgcatcttaacagaattacacaaaaaggggattcactttatcgtttcaagtgggcgcccttataccagattacgcaaagattttgctggctttttaaaccgaatcgacatgattgctgacaatggctcgcttttgcttcaagataatcaaattattagcactcatttgctcacttataaaacaaccttagatctaataagttttatcaaagagcattattccaagagttcaattattgtcactgggatcaacaattcatatacaactattaatgcttctcctagttttaagcagacgatgaacttctattaccccgatcgaattgaagttactgatttagcagcggctatcaatccgcaggatatgattactaaaatcaccttaagttatcaatatgatttttccgcggaattagaaaaagaattcaaccaaacccatgccgagaagattcactgtacttctagtggtttcggtttgcttgatattgtgccttacagcgttaataaagggagcgctctaaaatacttcttacgctattttggtgctaaacccaatgaattaattgcctttggcgacggaatgaatgatgctgagatgttaaaactagccggttacagttatgcgatggctaatgcagaagatcaagttaagaaaatcgccaagtatgaggccccgagtaacaatgatgatggggttttagaggtgcttgattcatatttagctaaagtagagaaataataattactgtaaactaaaaccgtctgaatgagcaaaataaaaaagtagccaagttttcttaaactaattgacttaagaaaacacagctactttttatttacccaaattaacaaaggtattaaagttcatataatgataatgcacgcgcatatttgatacttcaaacggcgtcccatcatccaagaagaagatcccttccattacaccaacaggttcagtcggcttcaaatttagcttctgctgatcttcttcattcgatggttcaacagtgatattcaagaatgacttagtaacggtctttccctgttcatcttccaaatagttaaacaaagacttttgtaaagtctctggctttaattccggcacaattttaatcggcaaatatccagtctcaattaaaaatggttgttcatctaacagtcgcagacgcttgaattcataaacaaaatcattttcatttaaaaataagtcttccgcaatttctttagttgccttaatcacatgaaaatcaagcaacttaatttgttgttttttaccagggactttaaaagaatcagtgattccaagattcgatccatcataacgaaacattgcctgtttgcgcaaatatagtggattaataaaagttccactacctcgctttttaaaaacgatcccttgttgagccaacagctccagcgcacgcttcattgatgatcgacttacctgatagtgttcggctagactgcgttcatcaggcagtcgcatccccttatactgattattcaaaatattctgtttaatgtcatgcataactgtccgataaacataatctgccattattctcgtccttgatctgcctttttaatactatcaataaaccaagttgcaaacttatccaagtccacatctgtcgcaatctccgcattggcatgttcttggtccataaaatccattacgctggcaccataagtatattgcccgcgcaattcaatattcacatttgcctttttcattgtaaacatttccggatgaagcataattccaactgcagtcggatcataaatcttaattcgcggatcaccgtctggttcatgaatgttagagaaaagtgaatacaacatattacccacttcaccacatgtcttaactttatccatttgctctggtgttaaatgggccttatttccaatttcaagtggagcaaccttaactagcaatccactatgaaaaactacctgcgctgcttccggatctcccgcaatattatattccgcaaatgggctatgatttccgtgaccaatattaccacccataattacaatttccgcaatattttctttaacttcaggatattgcttaaaaagtaaggcaaagtcagttaatggtccaatgcccatcagagttattttttctggactacttttaatttccttagccatcaacgttgcagcaagaccaggttcaattaaagaatcatcagcttgttcaaattcaaagccggcaatccctgttttaccatgaaccgaagcagcactaatcattggtgccaccagtggttgattagcacccactacgacaggaaccttagtatgcaaaaacttttctaaatttaaggtattttgcaaggtatatttcagtgccacgttaccccaagtaggcacaatcatgcgcacatcaagttcttgtgcaaaaagactaatcgtcatggcagcaatgtcatcaatgccaggatcagtactgataattaaaggtttcttgttcataaaattatcctctcgtattaagtacttttataatagcaaaaaaccaaccaattaagaaagtggttggttttattctaataattatttttcttttttgggtttaatacgttgaatgtgttcttcttcatggtcacctaatactaatggcacacgctcaaccacagtatcggcatactccagtccgaaccaagatgcagggttagaagataaattctgcagccatactcttgcttcaaccatgaacttttcatagcctgtcaatttagttaatggactaattacgtcgttaacaattacaaaggcgaagtcccctacatcacgacccggtgtagtagtgaattgttgtggttgagcttcaatcgttccatcagcgatcaaatcatgaacaatttgccgcaaataaacatttacactggtttgttttctaaaacctaaatacaactgaacgttaattacattcttagtaccataagtattgaccgcgtattctgcagtatatggctcgttagtaacattaacagttacaaaccagtaagccttagcccgtttaggtctcttatccaaaattgaataaagcatttcgcgcttaatgaatttattatacttaaccttagccatataaactacattcgtagcgtaaactggataatcatcacagtggctcaactcagtcaacatatctgtatattcatctaagcgaacataagcattctgctcctcacgcttatcacggatcttattgccatagaaccacacgtacatgattgccaaaataaaaccagcaattaaaacagtgacgtaaccgccatgcaaaaacttagttaagcttgagaataagaacatcccttcaataaaggcaaagactactaagaaaatgcatcgtattgatagcgcggtaccttttttacccagatattcaaataataagatagttgtcatcaacatggtaaccgtgatggccagaccatatgctgcttccatatgatgtgaagttctaaataagaaaacaattgcaactgtaatgacacagatcatcttattaattgaaggaatataaatctgtcccttctcatttgaaggatagataatattcattcttggtaaaaattttaaactacttgcttcagctactaaagtgaatgaacccgtaatcaaagcctgagaagcaataatagcggcaatcgtagccaaagcaatagcaaacaatcttagactacttggtactgcttcaaaaaatggattgaaatcaccattaccagcatgataattagcattttgtaaaatccagacgccttgccctaaatagtttaaaatcaagcaaacaaacacataaggccaagagcccataatattacttttcccgacatgtccgacatctgaataaagagcctcagcaccagtagttgccaagaaaattgaacctaaaatcaaaatacccactttattagcaggactaaataaaatacgcaaagcatgaattggattaattgcatcaagcaaactccaatcatggcttaagttcataaatccaatgagccctaaaaaagtaaaccacaggagcatgattggaccaaaggccttaccaatcacactcgttcccattctttgaattgaaaatagtaaaaccaggataacaatagtaatcaagataaccatatcttgcgacgaaactggaattacatcaccaaagcgcatatttttcaatccttcaattgaagttgtaacagtcacagctggagttaatgtcccatcagctaacaatgctgctccaccaattaaagctgggataactagccatttagccctctttctaaccaatgcataaagagagaagatccctccttcaccatgattagtcgccttcaaggcaattatcacatatttgaccgttgtcaataatgtaacagtccaaaaaatcaacgaaatggagccaacaattagttcacggttaacattactaatcccaccattttcagtcacaatcgacttcataacatacaaaggactagtaccaatatcaccatagacaataccgatagcaattaaaaggccagtaaaagacaccttttgcttaccagatattttattcataagtttttatcctctatttcacttaaaaattgaaatttttactagtatagaaaaagtctagattttttgcaataaaaatatatctttttgaaaaataaaaaagaagatgaaatctccttcagtcacttaatttactttttcttatcttcgatggtgccatcactatgagcaataattacttcgtcacacatatccaggaacaagccatgttcaactacgccaacagtatgatcaaggtaatcagctaaaccatgaggtgctggaacaggatctgcagccaaatcaataatataatttccatagtgagtcacataacgttgattgccatccatacgccaccgaggctttaatccttcttgttcaaaacgtttaaagttttgttcacaagaaattggtaaaacttcaactggtaatgggaagccgcttaaacgatgcactaattttgattcatcaacgatccaaatgatcttcttagaattgattgctacatttttttctaaagttaatgcaccaccgccgcctttgattccatccaagttatcggtaacccgatcagcaccatctacagttaaatcagcttgatcaatatcggccaattcactaactttaaagcctaagccctcaagttgttttttactacggttactagtagttacgatagccttcagttttaagccgtcttcatctttgcgcttacctaaagcatcaatgaaaaaggcaacggttgaacctgtaccaacgcccaataccatacctgatttaaccatggcagctgctttttctgctgcttcttttttcaaacgatcttgttcttgcttgttcattattcatcatcctccatcgcctgtttaacttcctgttcagttggaattgaaggctgagcacctaaacgttgtacggcaattgaagatgcacgacttgcaattttagctgcttcttcaaagttagataggccagaatttaaattgcttaccaaatatccaataaaggtatctcctgcaccagtagtatcggctgcttcaactttataagtcggtattaattcttcaacatcgggagttgaaatatacgcacccttatcaccataggtaataaccacgttttttacaccaagcatgtgtagtttttctgcattagtggccagcgttgaattatctttaattgcaatgccagtgatcttggcactttcagtttcattcggtgtaatgatatcagtatattgcagtaattctttaggaatctcatcaactgcaggagctggatttaaaatagtgatttttttggcctttttagcaatcttaaatgcttcaagcgtcacatctagtgggatttcgaattgagcaattacacaatcccaactcttaatcaaatcaccagctgcacggatatcttccactgtcagttcataatttgcgccgtgatcaataatgatgtcattttgcccagcttcattcaacgtgatataagcatggcctgtctttgctcccattgtggtttgcacataagttgtgtccacgccataactcttgagctgatgcgtgataaaatttccttcactatcttcacctacacggttaataaagtaagtttcagctccacttttagcagctgcaattgcctgattagcacccttaccgccaccagcagtagtaatgtctagcgcattaattgtttcaccaggcttaggaaagtcttttacatgtaatgttgtatcaacattacttgaaccaataactacaatcttcttcattatgagcatcctcttctaaaaatggatttattcaacctcaattataacaaaaaacgtattcaaaatattgaacacacatttttgaaatcttactgtaaaataccaccattaacgaagccttttaagcgctcagcttcccacttcaatgtatctgaatcgtcaacttgcgagatcttatacccaacgaaatatggtgaagcatagaatcgtggaataatcttgcaacaagtaccttgaccatcattaattggatagaaaaataagttataagaatcaacaccatgtgacaagactgaacgcacatattgtgtgcccttttgaatcaaatcggcccaagtatccaaattagtattatcatgtgtcaaaatatttacttcttggtagccttgaactggacgcgctgataagttcatttcaactgaacccgaacgcccgacttcaaatcctttaaagttatcagcgccaatatcgtgatagccatctttatgatataagcccacgatctgcatatgtggatgagttaaagaaccatcagacttgggaccaaaatttttataccaaagcacactctgataacggcctgaattattcattttttgaaaacacttcaagccaaacttcatcaactcttgattatcttcacgcgtataagttgaaatatctccctggtgatcacttgattcaattaaaattgtttgattagtatcctttaacgtagggtacttattcttcaaccaaatcttatcgccatctttttcataaatattaattagatgctgcacatcacaaaaaggacagccagcattctgatttccttgccgattaccataatcataatcatatggcttacgcttaccaattgaatattcatacactaaaggattcttgtccatatttttcacctgctaaaccaaagatatcatacatttaacatcattttaacaattttatcggttaattgtgaacatttttattaataaagctaggaatagtacgtctatctatgataaactacctttgtaaaagaaatacatgatatacatgagaggaagaatcatgaaattctataaaaaattggtacttactggtgccgcagctttagctgttctaggcttgagtgcatgttcaaataataattctagttcatcttcatctaataagaagattccaactaagattaacaagaagactaccgttaccttttggtattcactaactggtaatgcgcaaagcagtttgcaaaaattgactaaagattttgaaaagaaaaatcctaacattactatcaagttgcaaagccaaggcggcaactactctgatttacaatctaagttggtttcaggtttgcaatcgccaaaggatttaccgacaattactcaagcttatcctggctggctttacaatgctgccaagaacaatatgcttgttaacctaaccccatacattaacaattctgaaattggctggggctcatatgctaagagtggcattaagaaagctctttgggatggtgcaaacatcaacggtacacaatatggtgttcctttcaacaagtcagttgaagtacttttctacaataagaccttacttgataagtatgatgttaaagtcccaactaacatgagtgaattggcttctgcatccgcaaaaatttaccgtgaaagtcaccacaaagtacgcggtgttggatttgatgctttaaacaattactacatgatgcaaatgaaggaaacttacggcaaagacttcaataagaacttaaactttgctgccaaggattccgttaaagccatcaactactacgctaatggagtaagagccggctacttcatgcaagctggtactgaaaagtacatgtcaactccattcaacaatggtcgcgttgctatgttcatcggttcaactgccaatgaagcttaccttaagcaaggacttaagaagggttacacttatggtgtagctgctcgtccaagcacgatgaacgtacaacaaggtactgacatttatatgttcaaaaaagcaaccgcaatgcaaaagtcagctgcgtttaagtaccttaagttcttaacttctaagtcatcacaactttactgggctaaacaaacaggctacatgccagttaatactgctgctatcaacgacaaggtttaccaatctgccaagaacagcaagataccagcaattattgccaagacctctaagaacctttacttcttaccagtaactaagaatgctactgccgcatatgatcaagttaatgctaacatgcaaaccattttagctaaggcaagtaaaaagcaatcatggaatagcgatatcaagactggtaaagataagcttgatgctgcttggaagcaataatttttcaaataaaatatctatcaaaaaaagaagttcagtattaattgaacttctttttttacctaattatttactaaaaatggatattgaatttgatcattatcagttacattcaacttgtaacgagcacgatataaagccttttctaccgctaattgccctgcagttgtggccattgcaatcgaatatgacttgtgtggtgaattgatcaggatttgactgatagaatgcttaatgtatgactggattagaatgacataattcgattccttacatgcacgtaaaacattagaagcctgtttcatctcgataattcgagctactccattgtgtgcttcaatcaccttagccaagttagaggttaagctcttgtctcctactacaacggtaactcgttttttatcgaggtcaaaatcaattcgggaagcatagtcttcattttgcttttcagacgactgcttctcctttttttctaattgatgcaataaagacttgtgtctacctttagtcttgtgcttttccgtttctttatttttatccggcttttccttcttttctggaatagtaacttcagcttcggcataacgccatctaaccctaatgaaggatggatcactgactcgccaaacaatactaatcaggtcattttcgtgtaagttaaagtgacttacagtattcatgtctaagtataaaatagctttttcaggatttacttgacttaggtttttgccattagagtcctgcttgatgtataaaccaaaagaatcacggtgaactaccgctggaccaaattcgataatttcctcatctggcgcaaaagactttgcatgatgctcaactttaataattggacgattgccactgtcatttaagtgatctagcaaagtaactgtatcaccgttttccagcttttcaattctagtcaagtgttcattaaaatattgtactgaatgaccattctcatccactgcttctgcacctagcagcttacgcctaatctcatattgtttttcctttggtttagccacaggaattattttcttaaccacaggcttaggaataggagttatggtcgcatatttgtttttattctttaaaaccgtaggactcagagctttagcagcttcttcttttttagctttttctttttcaagctcttccttcgtttttttcggctttattttttctacagtattttcatcattttcttttttagtttctatttcagttttattttctagcttattctcagtttttatttctggctcattttttacagcctgatcagctttttccgcaattttaacgacttcattcttattctcaggtggattgcctagtactgcctggttatatattttactaataattttcaacgcaatcattgactgcttcagtgattggggatcgctccccgtcgcctgcattaaatcaataatatcttttctataatcaatcgtcatatatttaccttcttatttcttaaatatgaatattatacaaaaatttttaatgctaatctaattctttatagatttttatattatttttcctgtaaaaccattataataaaagtagttaaaatatcatttattaaatgagggagactactatgaaaaagaaacttttacttttcgtatcctttttagccggtttattgttcttggtatctacaccaacttatgctagcaagcttcctaaaggctatggtattgctaaaacctttaccacaccaaaagcaacccgtggcacctggtattatcgcgaaaagggtgataaaacaatttctaaggtaaagattactgctcatagcgtagatggtaaaaagctttacgtaccttcacaaaagttcttcgagaaaaatgtttacaacgtttcagctaagaagcgtaatcagttcatcaaaaaaactgaaaatatttatgctgcagctaactataaaaagggcttcaatgtcaacaattgggttaacttagctggtgatggtgaatactacatccctgttactagaactgttaacggcaaaaaggttaaggcattaagaatagctactggtgctggtccttatactgctgcatatgcatacaaaactaaggcattggttaaataatcattgtctaacgaaaaagcaaattagcataatttgcttttttcttttaccgatttttacttttccgtatttctccttcaaaaagagcggtcaattttgccaaactcttatgatcaggatagcgttgaactaattgctcaattttatcggtagctaatttttttacttcttcggctgagcccattttctctaaaaaatctgccaaatcacctgaacgagcaagtaacttacgctcactacgactttctgccagaaaagcttgatcaaccttacgtaacttcaaactaccatctgcattaaagtgatatcctccccacatatgctgcttaattggttgcatcggttcgctatccacataacacaattttcctaccatatggtgcgtctcagtaattcctaacgtaaccgggtcataaatatcgacatagttaaaaattttctcccgcattttagccacctgacgtcgttctgttggcgttaataaaagccaaatattggttccttcatacagataagcagctgcaattgcttctggatgacgacaattagctaaagcaaactgagcattaattgaacctaacgaatgaccataaatataaattctactacctttaaattgattaattgtctgattcaataagtgagcagctgactttaattggctaggaatcgtccgttttcgtgcaagcagtgcttttaaaattggtagattagttttaatccattcatcacgccaagtttgtggagtcccctttttaaaaccatatgatcctttaaataagattgttatttcattcggacttgaaatgacgaaggctcgcatcccatccttagcataaacattacgacaaacagttccaagataatgttgatctattttgatagtatcacccagctgcaattcatcatatgtctttttagttaattcaactcgttcacgatctgttaactgtgcatttacactcataatttttcctaaaataaaaaactaactcttactattatgttagcatgagttagtttttttggataatttgagcctttaatcatattttttctgcaagtaatttgcaatcgttgacaagcagaaacagacaataaagtacatgattgcaataatcacatacattggaattaagtaagtcgtgttctgactgtaaataatttgtgcgtggtataaaagctctggcaaaacaatgatagttgccaatgaagtatccttaaccaatgatacaaattgtgataataatgccggaatcatattgtgcaaagcttgtggcataattacatgatacatagcctgaccatacgacatcccgttggaacgggcaccttccatttgacccgaatcaactgagccaattcctgaacgaacaatttctgctagcattgcaccttcaaagatgactaacgctgcaattgaagctgtcgttggattcgttacaatacctaattgaggtaaaccaaaataggtaaagaagatgatcaacaatagcggcaagtttcgaataatatcaataataaagcctacaattgcagacacatacttaattttcatgtagcgaactaatcctaagattaatcctactacgaagcttaatgcaattgaaattaatgaaacataaatcgttacccaaagtccttgtaataagaagcgaatatcgacccatgaatatgcatgaataaaagtttccattctctatccccttcctattagctgactaattttttctctaaatgacgcatgtagtaactaagcggcaaagtcaagatcaagtagaacaatccaacaataatataagtatcaattgtttggaacgttgagaacgcaatcaattgtgcttgatacatcaagtcaaaaccggcaacaaaggccaaaactgaagagtttttaaccaagttgacaaactggttgcctagtggtggaatcactatcttcatcgcttgaggtaagatgacataacgcatggcttgcacataggtcataccgttggagcgagcaccttccatttgaccagttccaattgaattaattcccgcacgaacagtctctgcaataaacgctgatgtataaagcgttaaaccaattgtccccgcttgaaatcctgacaatttcacaatataacgtggaacgatcaaataaaagatcatgacaattaccagcaaaggtatatttctaaaaatcgcaatatagatcttcgcgatcacttggccaaatttagatggtgctacctcaagcaaggcaaaaatcacgcctaaaatcaaactgaaaactagagcaataatactacttaaaatagtattccaaaaacctgttaggaagctgccccagttgttagtaataatttgccacattatttcaaaaccccctttagactaaaaccaggaattccagcaaaccactttttaatcaaacggtcataagtaccattcttttgtaattcattcaaagcttggtcgatatgatcagccatttgtttttgtcccttattaacagcaattccgtaaggagcattactatagacgccgccgactaacttataaccaggattttcttgagcgataccggcaagcaagccgttgtcagtagttaatgccacaccttggttagccttcaatgcagacattgcttgaccatagtcatcatattgcaaaatccgcgctttaggggcatacttatgtacatcatcaactgcggtagttcctttaacggccaaaacagttttgccttccagatccttaacattcttgatcttactattattaggcactaacaaagatgaaccggctggaaagtatggcttagagaaggttacttgcttggcacgttctggtgtaatagtcattgtggctaaaacagcatcaacatttccattttttaaaagtgggattctagtgttggcagtagtagtaacaaaatcggttttagcatctttacctagcatttgcttagttaaagccttagccaaatcgatttcaaacccttcaatatgtcctgtcttaatgttcgttaagccaaacaatctagtatctgctctaacgccccaaacaattgtcttactttcttttactttttgataaacattattgctagcatgcttgccacaagcagtcaaggcaagtgccaagattagcaataagggaaagaaaaaaaatctttttaattttttcatggcgtgccaccttaatctttagaaatgatcttgcttaagaattgacgtgcacgttcagtatctggatgagcaaagaattcttctggcttgcgatcttctaaaatatgacctttatcaaagaaaattaagcgattgcttacttctctagcaaaacccatttcgtgggtaaccacaaccatagtaatgccttgttcagcaacatatctcataacttctaaaacatcttcaatcatttctgggtcaagggcactagttggttcatcaaataaaatcaccttagggtgcattgctaatgatctagcaatcgctactctttgtttttgtccaccagataattgatgaggataagagtcaattttatcggccatacctactttttcaagatattgcatcgctactttacggttctcatcatcaggacgctttagcacaatcttaggcgccagcataacgttctctaacacagtgtgattattgtagagattaaagtgttggaataccatcccaacatttttacgaatcttattaatatcggtctttttatcagccaaatcatacccagttacaattaattgaccgctattaattggttccaagccattcatagttctaattaaagtactcttacctgaaccagatggaccaataattgaaaccacttggccttcatcaatctttaagttaatatctttcaatgcatggagctttccatagtacttatcaacatgcttaaattcaataattgctgtcatggcttctacctttctttcctttgtctacacaatataattattttactcttcttaaagctaaaactaaatattttagcaattcaaaatagtataatagcctgctaatcttataaatttgttcggttttagcaaaatatatttgtatttagctagattaaaataatcatattaacgctacttacgaatttattaactactaactttcaggataaagaaaaagcccatcatcccctctagtttgggacgaaaggcttttttccgcggtaccacccacattgtctaagtatagaccaactcatgaagcaccgacatgcttcaccggcgtggtaacgtaccggagacgtctcgacctactataagaattgttagttcggtgagctgctaaaagtgtttttcaatagttcagggtctgctggcttttcactaacaccaactcactgctaagaataaactacctactcgtctttttcatagccttttaatttatttatatgtatttaacattatttttcaagaaaatgcaagggaaaataatttaaatcgcaaatgtatccgtttttaattaaaataaatgctgttaatattcggaaaatagcttagaatattagtgatacctagaaaattaaaggagtttgatatgggaaagcttgaaaaacccgttattattggaattgctggtggttctggtagtgtgaaaacaacaatcgcacacgaaattgccgataacatcgatgatcaagatcgaattatgatcatgacgcaggattcttactacaaagacaatactggcgtatcaatggaagaaagaatgaagatcaactacgatcatcctgatgctttcgatatgccactacttgaggcacaattaaatcaattgatgcacagaaagccaattgaaatgccaacttatgacttcactgctcatcccgtagtgatgaaactattcacgtcgaaccagctgatatcattattctagaaggaattttggtactctttaacgaagatatccgcaatttaatggacatcaaggtttacgttgatactgatgatgatatccgttttattcgtcgacttgaacgtgatatgaaagaacgcggccgctcacttgattcagttattaatcaatacttgggcacggttaagccaatgtacaatcaatttattgaaccaaccaagcgttacgccgacatcatcgttcctgaaggcggcgaaaacgatgtggctatcgatatgttaactactaagttgcaatcagttttaagtgaataattatcgagatataacaaacaggcaagctaggaataatacctaacttgcctattttaatactctaaattatcttagtttttcttatcatcctgtgcattagctgcatccaaaatacggttatatttcttagcaaagaataccaaaagcaaaacactggcaataacataaataaccgctgcaatgtagtaagcattagcataaccatcttgcgtattaaacaagtaaaattcagtgaagagaccatcaataactccaacgatagcataggcaatttgaactacaccagtaaaggctggacgcaagtccttgtcaacaataaccatctgaacttcttgctgaatcggcatcgtggcattggctaaacctgttctcaagaaaagcagaattgcgacaatgacgaataagaaggctccgctacctaaccggcgaccattagctaacaaaagcataaccggtacacaagttaatgtacctgcagcaaccgacacgattgcaccgagtttcttttccaaaaatggagcaaagaagtaaccaattagcattgctgcttgaacaaaagtgttgatggtagaagtaacatcacgtggaatgtgcaaataactattcaaataaattggcacataaacggcaactaaacgagcaccaagttggataccggcaatataaacaatccacatcaatgtcttcttgctcaaaagcttcttatacatggccaccttttcaactctgctaggttctttatcatctgcagtagaacgatagtcacgtggtacatcgtgaataaatagggctaagataaaggctaacatcgttacagcagctgtaatataaagtaaaattctgtatgaatttgtatagtcagctaaagtttggccggttaacatttcagaattacctgatagaactgaagcttcgtgataaggaatccctctaattaagccaaagaaccaaacaacagccttcccacctaagaaagtacaaattgtctgcgtaatcaagttaacaatcataacggttgagaacatcttagttctaatcttccctggaacatatgaagtccacatcagtggatacatcaaatcataaaccccaattgctgtccaagaaatagtataagcgatcatgatgataatttgattggttgtgatacaggttaaggccataaaaattgccgtcattggtggcaagatcagcaaaatctttcgatagccccatttatgaaccgtcgcaatcatgactgacatcaaaattgctgtcgccgcattaaaaatgtttaaacctgaaatcaagtgtggcgctacaatcttgtagtaagacaaggctgcatcattcgtaatccctgttactgcacctaaaataccataaatccataagtagacaatgacattgtgtttataacgtggattccaatttttaatcgcctcatcctcagcttccttttccgcattgcttcgtcgagccatataagtccccttccccttttatgaaaacgtatacaaatatctaatttaatcttagcacctatatagtattaataaagtgtgtgtatacgaaaaggtattgattatatgacttaggcaagccttggctttaatgctttatcaaatagattagtaatcaattttactagtacaccatcaaatactaatgatgaaatcatgctgacaataaacatcaaaatttggacattaatttgatagtgactccaaccaaataagaagtagctgggaataaagccacccaaattagcaaaaaaggcaccggtcaagacacttttccaagagaatctttcataacgttcctttttagggaaaaagccaatttcattcattgccccctgaattaatccttcaaaaattgtcaaagctccccattgtccgccgatcgccatttctacagtcgcagccaataattcaccgattgttcctgcacccttagtcggtacaaaatacattgctagtggtgccgccatgtaccataatcctgtaaaaatattatccactactggtgcataacccgtgggcaaaaaactcaatttcaccaagttatacacattattaaaaccataagtgtaaatcacgcccatgattattccaattaaagccactaaaataattgactttacattccattttgacgatctagtaaacataaaaatgctccttactaacatactgtcagtaggagcacacaaataaaagttaattctcttgttagcactttcccttgcgcaagtattatcttgttcaggttcgaagggtattatctcagcattacgcacccctagtgacatttcatttatttatcaattaagtcaagtatagcacattgttaatcaaatgccatttgatctgtgtaaagtttgtaataaaatcccttttctttaagcagtgcctcgtggctgccttcttcgatcacattaccatcttttaacacaacaatcttattagaattcaagatcgtctttaaccggtgagcaatcacaaagcttgttcgtccagcaatcacagtatccattgccttttgaatcttttcttctgttaccgtatctacgttagaagttgcttcatccaagattaggaatggtggattcgttaaaattgtccgagcaattgacattaattgcttttgtccagttgaaaagattgagctagcatcgctaacttgagtatcgtaaccatcaggcaaagtctcaataaaatcatggatattagcctgcttagccgctgagatcacttcatccattgaagcattcggcttaccataacgaatattgtccgctacagtaccagtaaataagacagagtcctgcaggacgatcccaacattatttcgcaatgatgttagttgaatatcacgtacatctgtcccatcaaaggttactttacctgaattaacatcatagaagcgatttaacaggttcataatcgtagttttacctgaaccggttggtccgaccagagccactgattggcccttatcaaccgaaatatttactccgtgcaaaatttctttatctttattgtagccaaaatgaacattttctagcttgacaccatgattcaaaccactaatgaccttaccatttggcacttcgttttcatctttttgttcttcaactgtagctaatcttcttgccccagttaaagctaattgaatcatggaataaattgaagtaatttgcgtcaaaggttggaaataaacttgtgaatattcaacgaaagttacaatcaagcccaatccaatagcctgagaaatttgaccggaaataatcatccaagaccccatagcgatgacaattgccaaattaagtaagttcaatccgttcatcaatgggaataggattcccgaataaaattgccccttaaacaaagcgattcttactttattgttgtagaccttgaagccatcaaccgattcttgacgcaaaccattggtaataatcaccttttcaccattgatctgttcggtaatataaccatttaaatcgccaatttcatcttgctgcttatcgatataaacgcgagcttttttcattaaaaggacactaataatcaaaatgaatggtgttgtcgcaatcgtagtccaagccaaagtactattaatcgtgaacatcacaataattgttcccacgaacataattccctgggaaataatttcaaaaatcgcattgttcattgcgttgaaaatattatcccaatcggaagtaagtagcgataaaagtttaccatcctgatgagtatcaaagtagcgcactaacatccgttgaaacttggcaaatagattctcacgcatgtcattagttgaatccgcattgaacttggacattaccatccaagcaataaaaatcgctatctggctcaataagtaaaacaagaacatcgaccataacgcgctatagaacgtgttcatggatgctgtacccttttttaaatcaaccaaataagtagttaaagcagtaactgaacggcctaaatatgtaggtgccataacctgtgcaccactcgaaatcagagaaaggataactacaatagtgattcccttccaataaggcttcaaatacttagcaaaatagcgcaatgcctttttcgtattactcatttattcatttcctcctttcttacctttttgtgtcttgaagatttcttggtaaaccagcgaagtcttaagcaattcttcatgcgtaccttgtgccactaatttaccgtcatctaacactaaaattgtatcggcattaatcactgaaacaatcttttccgcaataataaaagtagtagtatcaggcagctcatgctctaaagcttgctgtactttcttctcactttccgcatccagagcagaagttgaatcgtccaaaattaaaattggtgctttagcaatcaagccacgtgcaatagatagacgttgcttttgcccaccggaaaagttagcagaacgctcctctacttcatgatcgaaagaatcgttataacgctcaataaattctgatgcttgcgccatattggcagcacgctgcaattcatgtaatttagcctgagcattaccttgacgcaaattagatgctattgtacctgagaaaagaactgctcgctgcaacacaaaagaaacagttttgcgtaatgcagcttcagttacatccttaatattttgaccgccaatttttactttacccttagttggatcatataaacgagcaattaattgggccaaagttgatttaccagcacctgttgccccaacgataccaaccatttgacctggcttaatcttaaacgaaatatcctttaaagtaggatcatccccatcaggataagtaaaggaaacatgatcaaactctacgctaccgctaagaggtgcaaccgaaccactttccacaaacttgacatctggttcagtctccaatacctcacgaatacgtccaagagaaatattagctcttgaaaattgcattaaggtcattccggcaatcatgatcgtaaatagcagggttaaaacatagttcacgaatggactgactaccgcaatatcacttggatgtgccgtaatatttttaccaattaaataaacaattaaagcaattacggtataagcgatcatctgaaaagctggcataattgcagagaaccagtaaccaatcacaatgttgtagtcattcaattggtccgaagtttgatcaaactttttaatttcttgtggaccttgattaaatgacttaaccactctcacaccttgcaatgtttcttgtgcttgattagaaattcggtccatcatttcttggaatttggtaaacaaactattcatttgtcttaaaacgtaagcgccaaaaccaaaaataagtgcaaccatgaccactggtgcccaccagaagcgcggaataatcacgatacagaagataaatgaaccgacaattaaaatcggcaaccgcaacatctgcataaatagctgcatcatcatgttcattacctggttcatatcgttgatcaaccgtgtagttagagaacctgctgaaaatttcttaatattaccaaaagagaacgtttgaatcttagcataggtatcttcacgtagatcactaactactccttgtgcaattttcgctgcaaaataaacgttaaaaatacccgaaataattgcaattatacctaggactactagccagattccatcagacaagactgcttgcttctgattcgccatcaatgccttttgaatattttccaataatttaggctgatataatccagaaaacgctgaaactaagatagcaataattgcacaaacaacatcttttttataacgctttaagtatggaagaattattttaaagttttccatttttactcctttcttcacttaaaaaatgccaaaaagtagtgctccattcttctgaaagcttagctaacaatttcattttgtcagttcccatggcttgagccgttttttcctctaactcaaatagaggacgcaacctgtcataagcatatttccgccctgcttcggtaagctggcaaaatcgaactcgcttatcgctaggatcaacagtcatcgtgatatgatcatgatcacgcagaatcttaattcctttgttaatcgactgcttgggtaaatcactcagatttactaattctctttgtgtcaattttccccgaatcagtaattcatacatgattaccactaaatagtcaggcaagtcatgatcctgctcccattggctataagcacggctgccatggataattgatagatttaatttttctgtctcactaattttcattacttcaccaccatatttagtctacatgcataccaaatatattagtatgcacatggactattgtcaaatcattttgtcaaaaataagactataattaaagtaaagaaacaatttttgcatctaaatttcaaattggtataataaaaaaatcatcaagtaaaacaaggcagggattatatgcgtaaaaagtttttattaataatttcaatagtggtcctgtttgctttgccattaagtggctgtaagcaaaacaaaaagcaaaacgtttatcaagcagttaaaactagtaaaaccattaactggggcgtcaaagccgacacgccattattcggctcaataaatattaaaacaggcaaacttaatggctttgaaattgatttagctaatgcattaacccatgaaatgctaggcaaaaatgtcaaagccaatttcataacaacaacggccaacaccaagattcagcttctaaaaaacacgaatgtcgacgccgtcattgcagcaatgaccattacgcctgaacgtaaaaaacaagtcgaattcagtcacccttactttcctgctggacagtcaattatggttgctgacagtagcgccattaaaaatgctaaaaatttgaataacaagaaagtgcttgtagttaaaggaactactgccgccgatgctatccatcaagttgctcctaaagcggaaattttacaattcgatgattacggccaagcttttgccgcattaaaagctggacaaggagatgcctttgtaactgataacggaattttagctgggattttgcgtgatagttccggctataaattagttggcggcacctttaccaaccagccatatggtattgcagttaataaggggcaaaatgacatgctcaagcatatcaacactgcattagcaaaactagaaaagaatggcacatataatcacctagttaaaaaatggtttggcaacattcctggtatgaacattaaagaactagaaaagaagtaagaaaaaggctaagatcaaaattttgatcctagccttttcgcttatttagcaatgaaatcaagtaaagtaaacattacatctttatttttctcaggcacaccatgattaataatctctgtaggcgtttgatgtaaatccttattttctaaagcatatgctccatcattaatagcaatctcacgtacattatcaatttgcggttcaaagtggaactgcaacccaattacattatctcccagtaaaaagccttgattcttaactagatcactagagaataataacttagcttcggttggaatttcactcatttgttcatgccaatgaagagctgttaacttatccggaattcctgtaatagtctgatcttgcaaataaactggtgcccaacctacttccttagcgggtgcatcaagtaccttatagcccaaagttttagcaatctgctggctaccaaaacaaattcccaagatcggcttgtgttgatctaacatttgtctaatcaacacacgttcatttttgacccaatcaagatcatcattaggactgtttggactgcctaggactactaatagatctgtttcatcaacagttggcaaaataccaaaattccctggatggtaaacgaacatttcgttatctctagcatggcaccaggcttgaatagaaccaggtccctcattaggtgcatgctgtaatacattaacgcgcataaaatccctttctcactcaacaatatttttgtttttcattttatactcaattctagtggtaaacaagaagaattcagttaatcttttactatatctttagaaactatatgtcaccttatatgatataatgttatacatatttttacatctggaggacttttatggacaatcaccttaaacgcagtattggcttaggttctgcactttcaattatcgttggaaccattatcggttctggaattttctttaaacaagcttcagttttagatagcgcaggctcaacctttatggcacttttagcatggattttagctgggattatcacattaaccgccggcttaacgattgcggaaatcggtgcccagatgccttatactggtggactttacgtctatattgaaaaaatttacggccgcgttttaggttttatggctggttggatgcaggctattgtgtacggtcctgctatgatagctgcagttaccggttttttaagtattatggtgactaatctctttggcatcggcaccgaatggcgtattcccattggtttgatcactatcatcgctatcggtggtttaaactttttagaaaataaagtcggtgcagcctttgctataatcactacaattgctaagatgatccctatttttgcaattatcttctgcggcatctgctggggtgagcaaaacgctgtcgcccaaactgtgactgagctgaatcgatcaacaggtggtcttggcgtagccgttctcgctgccctttttgcctatgacggttggatctttattgctaacttaggtggcgaaattaagaatccacaaaaattattacccaaagcaatcatcattggaatcactacagtattagtaatttacgcgttaattactattggtatttttagtttcatccctgccgataaaattcatgcattaggtaaaaattcaaccacttatttggctgacgctattcttggtccaattggcggtaaagttctatctgtcggcattattatctcaatgctaggcactctcaatggagaaatgctcacctttcctcgtattatttacgctatggctaagcgcggggatttgcctttctcaagatttttatcatacgttacacctaagggaaaagcaccagtcattgccactatgctcttaattaccttaactggaattatgatgactttcttcgatcctgattacctatcaaatctctgcgtcttcacaatttatagtttctatgttttagcattctttggcttattcattttaagatacaaaaataaggaccaacgtcctttcagcgtaccgttttatcccctaattcctttagtagcaattgcgggcgggctcttcgttttagtcagccaattcttcaatgatcccgctggcgttttgctttttactggaattaccgctgtcggctggccaattttctttttagttaaaaagatgagcaaagcacagaacacgattatcgaagactaaaaatctcaaatttttcttgttcatttttaataattatgatattctaattaaaattaatttaggagattcaattatgatttatcaagacaccacattggcatactcatctagctcaagttccaactgaacttgagtgattttggtgtacgtaaatcagcagccggattcactcaatcgtttctagacgataaggtgaatccggctatttttgtataaaggagaaaaaatggacaacaagcttaaacgcagtattggtttcggctcagctttttcaattgtaatcggaactatcatcggctctggtatcttttttaagcaggcttctgttcttgacagtgcaggttcaactacaatggccttactagcttggatttttggtggtctaattaccttggctgcaggtctcaccattgccgagatagggggcgcaaatgccctacactggtggtctttatgtctacattgaaaatctctatggccgcattttaggctttatggctggttggatgcagatcatcgtgtacggtcctgcaattattgccgccgttgctggttttatgagcatcatgatgactaacttttttggtttgaatcattcatggcgcattcctttggctttaatcacagttttagcaattggaatcatgaatttcttcgaaaataaggtaggtgcaatcttttcagtcataaccacgattgccaaaatgattccgattgctgtaatcaccatttgtggaatctgttggggtcaacaagatgcgattaaccagactgtagcagaggttagccaacacactagtaacttcggtgttgctgtcttagcaactttatttggttacgacggttggattttaatcgctaatttaggcggcgaaatgaaaaatccccaaaaattattacctcgagcaatcattgcaggaattacagctgttttggctatttataccctaattacaattgggattttccgcttcatccccgctaatcaaattcaccaactaggcgaaaacactactacttatctagctaacgcggttttcggtgcaatcggaggtaaaattctttccattggcatcatcatttcaatgatgggaacattaaatggaaaaatgctgacctttcctagaatcgtttatgccatggctaaacgaggagatctacctttttctaaatacttagcctatgttactcctaaaggaaagtcacccgttgtggctactttatttattgtccttttagcccttttaatgatgattttctttgatccagaccacttatcagatctttgcgtctttacagtttattgcttctatcttttagccttctttggaatttttatcctaagcaaaaagaataaagcagagcgtcctttcagtactccactttatccttttgtgcctataattgctattttaggcggtttatttgttttaatcagtgaattaattaatgatccagctggtgttttgctttttgctggaattgtcattatcggcttaccgatcttctacgccgttaaacgcatgaataaacatcgcttgtattaaagcgacttttctacactgtagcttgcacgccacaattcttccattttagctaaacgatgccaatctcctttttgacacattgtatacaaggcatgagcaggatcataagcaattggattgccctctgcttcttttaaataagccccaacaatgctgattaacatcatccgaaagcgttcaatctcattacggctaaagtaagtttcaaaatacttagttactaagcaatcaaccgttgcatgcgaagctttgcgcaaagaagcaggattcttacgatagttatacaaagtataagttgaaattccagttgctttacttaaactagtaatcttaacattacggtcagttattagtttctctgctctttgtacatcggttaaaattttgggatgcttaaagtgagctggcattgggatacgtttacttaattctgcaattaccttttcaacagcttccttcatttgctgcgtagctacttcttcgtttaccttgtcattaagcaattttcctactacaaacgtatgatcagtcacttcataccttttagtaactgcattgtaaaaataaccttcaatacctgtaatcttaactgcatcagttccagcttttgcatagtcaaaaaagatgtgttgctgatcaccagttaatggtgaaaatggcaaattatctagcgtaaaaacttgtacatttaaagtataatctgaatgagcgggatcatctgcatcacaatgatacatcttcacttcccgatcatgaataaaatcttcaaaaataagattttttccatattttttcttcatttcttaatccccttttatatagtcctattatctattataagcaaaaaactagcttttaaaagctagtttttgtttttattagaaaatattcggtttagggcaaataattaccagcagctaagtataaatcgtaccactcttgtctagtcaatcgaatcttggcacctttagcagaatccctaatgtgttgcggattcattgatccaactagcatttgaatatttgcaggatgacgtaaaatccaagctgcagcgatcgcatttttacctacctcatacttatcggccagtttttgcaactcttgattcaacttggggaagccatcattatcaatgaaagtcccttcaaacatgccatactggaatggtgaccaagcctgcacagtaactttgtgtagacgggcataatcaagaaattggctatcacgatcaactgatggtttatctaccatattcatatgcatcccaaagtcaatcattcctgtatgtttcaggctaaattgtaattgattgaacatcaagcgctggctcaagcaactttgtaacaatttaaattgagccgtatcaaaattagatacgccgaaaaagcgcaccttacctgctgcctgtagttgatcaaaagcctcagctacttcttctggatccatcaatgcatctggtcggtgaagtactaatgaatcaagataatctagttgcattctttccaaaatttcatcaacactatgcaaaatatgttctttagaaaaatcataacgttttcctggaacaattcctgttttagattgaataaacatctcttcacgcttgatctgcatttggctaaaagcttgaccaaaaatctcttctgattttccaccgccataaatatcagcagaatcaatgaagttgatcccagcatcataggcggcttgaattgccacttgagcctctggaactgatttttgattcattcgcataatgccaagtgccatcgctggaatgcttaaagtagtacatcccattttaattcgtttcataatgtaagtcctttcattctttatttacctcacatcatgaaccaaaaatagctaagtttcaaccacaagaaattcaataatcttttattaatatatcttagctactgccgattgaattgattctttatctaagaattcgtcataacttgtatcttggcgactaacaatacctttaggtccaacttcgataatgtggttagcaatagtttgaataaattcatgatcatgtgacgtgaataaaattgaacctggatatgaaacaagggcatcatttaatgcagtgattgactcaagatctaaatgattagtaggatcatccatgatcaatacattagccggttcaagcatcatacgtgacaattgacaacgaaccttttccccaccagaaagtactttgatcttcttctcaatttcttctccactaaagagcattcgacccaagaacccacgcaagaaagtattatcatcttgttccttagtcgcatattgccgtagccaatctaagattgtaagttcatcattattaaagttagcgttcaaatcgcgtgacatgtagttaaaggccgttgtttgaccccatgtaacggtaccagtatctggcttaagtttaccagcaacgatatcaagcagcgcagtcgttgctaaagcgttacgcgataaaaatgctaccttatcaccaggacgcacgatgaaagacacattatccagaatcttttcaccgtcaaccgaataagaaacgttctccaccttaactagatcattccctaagtcacggtgcatttcaaactttacaaatggatatttacgactcgatggtttaatatcgtccaaggtaattttatcaagttgtttctttcgagaagttgcctgacgtgatttagatgcattggcagaaaagcgggcaataaattcttgtaattgcttcatcttttcttcttttttagcattttggttagcagctaattcattagctagcttgcttgattcataccaaaagtcatagttacccacataaagctgaatcttaccacgatcaacgtcacacatttcagtacatacttgatttaaaaagtgtcggtcgtgggaaacaacaatcacaatgttagggtaatcagccaaaaagtcttctaaccattcaacggtatgaacatccaaaccgttagtcggttcgtccaatagcaaaatatcaggattaccaaacaaagcttgggccaataagaccttaactttttcgctttcaggtaaatccttcatcatcatttgatgttcttcttcaggaatccctaatgattgcagcagcttagccgcatccgcttccgcattccaaccatcaagttctgcgaacttgctctctaattcagctgccttaaccccatcttcatcaccaaagtcaggtttggcataaagagcatctttttctttcattacttgatacagttccttgtgcccttgaattactgtgtccatgacagtgaagtcttcgaaagcaaagtggtcctggttcaagctggacatgcgctcattgggatcaattgaaattgaacctgttgttggttccagtttcccctctaacaatttaagaaaagttgacttaccggcaccattggcaccaattacgccgtagcagttgcctggagtaaattttaagttaacgtcttcatagagtgtgcggccaccaaatcgtaaactaacgtcggatactgtaatcaatctctttacctcgcttaaaatataaaattatgtttaagtatatcaaaaaagatggtcccttataatagagaatccatctttttaagcaatttattaaaactttttgaagctatctagcttttcctgggtaatatcacgaataattgcagtagctaaatcaactgaagccttaaagtccttataactactgaaacaatatggtgaatgttcatagcgcaccggaataccgatgacaattgttggcgcaccattttcgtagtaaattgcagcaccatcctgaccgccaccggttctaaccgaacgagtatatggaatattatttttatcagctaaatcacatgcatattgttggaacttaggatttggtaaaaatgtcgtatccatatcgcgcaacattgggccacgttttagaccagtttgagaaagccagtcaggcgtaaaagtatcatcagctggacagctttcgagtaccagacaaagatctggcttaacttttctagccgttacataggcgccacgcaagccaacttcttcttgactagaaagtgcagccactacgtcaaagttagtttcttcacccttcaaattatcaagcacatcaaccatcgcaccagcaccaaaacgatcatcaaagtctttaccgaagaataaaccggacttttcatgatattcgcatttaacatcaacaaagatagggcaacctgtatcaatcttgtagtccttgattgtctcctcacggctagaagaaccaacatcaattgacatatctgccacatcaggtacactattgcgctcagctgctgtcatgaagtgaggcggcttagttgctacaacgccagggatatattctccatcacgattgcgcactttaacgcgcaaggctggaatattatattttacccaaccaccaagtggaacaaacttaattaaaccattagggcgaacagcttgcgtaatgaagcctacagcatctgagtgcgcatcaagttgaattaccggtcgatttcccttattttctttcttggcggccccggatttaaaattgaagtgcaacactaagtgttaaacaaaaaggccatgaagacctaaacttgaagtgacgaaaaatcaagaaaggaagatcttcatgaccaattcaaattctagcatttctaagcactatcatcaattaaccagcgtacaacgtggacaaattcaagcaatgctggattccggcataacttcccgtactgttatcgctcaagaagttggctgccataagtcgacaatcagtcgcgaaatcaaacgcggaagcgtcctgcaaagagacagcagctatttattgtatgagcactattacgctgatactgcacagatttattatgagaagcgtcgcaaaaactgctatcagcgcaatccattgaagcattatgctgtctttttgagaatgctctccagacgctttaaagctaaatttgatgccaccagcatcgatgagttcgttggtgaattcaaaaggactatgccaggctacccttgtcccagcacaccaaccgtctatcgctatattgatcagggcttgctggacataagcaatattgatctgcctatgaagctcaaaagacgcaggaacaagcgtcatcacagccatggcggtcacgctttgcacaagaagcatcttggcaattccattgaacagcgtcctaaagagattgaagacagaaaagctccgctgcactgggaaggagatctggttaaaggcgtcagacgcaagaatcagcctgctttaatgactttgactgaaagaaccacacgctttgaagtagttatcaagattcctgactatcgggcaagcacatgccaaaggctgcttcaaaaggagattgacagacatcctgcctggtttaaatcaatcacgtttgacaatggctctgagtttgcggatatgaccaagatcaagggctgccagatttactttgctcacccatattctccatgggaaaggggcaccaatgagaactgcaatggtcttttgcgtcaattcttccctaagagcaagagcatgaaagacaagtcaaaagcttatgttcaacaggcaactgatgccattaaccacaaatatcgccgaatcctccaatatcacacagcagaggaactcttcaagcaatatatctcttcataacctaactgttgcacttaatttgacaattcaggaattatttattttaagaatgttacaaggtatttttgcaggctttgtttctaattccaatgctctagttgcgactgaaactccgaaggaaaaatctggacaagcacttggcactatggcgtctagctttactgctggcaacttactcgggccatttattggtggagccttagcgtctattttctcctatcgcgttaccttctttattacaggtggtctattattaattgcatttcttttgtcattgttctttgtccatgaaacagacttcaagccagtaactgaaaagaaacttgataaagcaagcggagtaattaaagaattacgctcaccgcaattaatctttggcttgcttttaactactctaattattcaagctgcaaataattcgattaacccgatcgtttcactctatgttaaacaattgatggctaaccacggtaatgtcgtctttatttccggggtaatagctgctttgccaggaattgctacattccttgcggcatcgcgcttcggtgcactcggtgaccgaattggaactcataaaattattattgctggctttattggagccacaatcctcttctttttgactgcttttgtacaaaatactgttgaacttggtattttacgctttttagtcggctttactgatgcttgcttgttccctcaagtgcagactttgcttactaaaaatacgccagcaaaaatcacgggccgaattttctcttggaaccagtctgctatgtacatcggtaatattttcgggcctctgctgggttcaactatctcaggattaactaattacagcactgtctttatcgttactgctgggattgttgtcttcaatttgattttgtttagatttaatgtgattaaaaatttgcagtaaaaagtgtctgggaaaaaactaagtctcagatcatgaaaaaagaacgttgaatttttgtttcaacgctctttttgtatacttttagctccagccttgatattattaaatcatcacaaaataaaaaaggtggaaactaacatgtacaagaattatatcacaggtcaaactgctttaacacttaatctagattttgccattccggccaatcatttggctaatgtcatcagctggtttgtagattcaattccagaagatgttttagtaggcaagactgctaaaacgggccgcccagcctatcatccagccatgatgctcaaaatactgctttttgcttactccagaagagttttttctggcagaaagattgagttgatgctggaagaaaatctgccaatgatgatcttggctgaccagcaaaagatttcatatcatactatcaataattttagatcaagcagccatgccaatgaactgattaaaaagagctttatctacttcactaacctgttagaagatgaaggcttaatcaatgaaggtgctgcttttatcgatggtactaagattgaagctgatgctaaccgctatacatttgtctggcgcaaagcggttgaaaagtatcatgaaaagctgaaaggccaggcagttgaactttatgatgaattgattactaaagaagtagtcaaagaaatggaaaaagaaaaagttcaaactagtcaggggctaaaggaattagctcaagaaactgaagcagaaattaacaagctgactaaagagattgagcaggaaaacaaagccattcctggcgattcacctcgaaaagccaagcgacgtggactaaaaaagattctgcaccggctaagaaaagattatgtgccaagaatgcaaaaatatgaagaagccgaagagatctttgccggacgcaacagttattccaaaacagatcatgacgccacctttatgcatatgaaggaagaccacatgaaaaatggtcaattaaagcctggctacaatattcaagcagtcacgaccgatcaatatgtagttgattatgccatctttcctaatccgacagatttcaaaactttggagccggttttggatcaaatgaccgtgttggacaagtttgacaaaatcgtcgccgatgctggctatggcagtgaatacaattattcgatgctggaggaaaaatatccagacaagaagtactttattccctacactatgtatgaaaaagaacagaccaaaaagtataagaatgatccaactaagctaatcaactggtactacaatgaaaaagatgattattacattgatcatcatggcgtcagattcaatttcaaatattacagccagcgcaaggatcgttctactggtcaggtccgtgattttaaggtttatgaggcagacgagttccagctaacgccagaattggaacaattggctaaaacagctagcggccgccagcgccaagttcgctataatcctaactggcaatatttaaaagaaaaagcaaaagaagttctccaaagcgaagaaggcagacacatctatggcatgagaaaatatgatgtagagccagttttcggacatttgaagaacgtatttggcatgcgcagaacgcacctgcgaggtaaagagaaggtcgaaaccgatatcggaattgcctttatgatgatgaatttgaacaaatattgtcaaagaaggtggctgaagggccgatttttattgttaaaaattttaaagagaacaaaaaaacgatcaagattcttaaaaaaggaaatcttgatcgtttttattcatctggaagctagttttttcccagacacttttctattccgcagctttctttgcttcatgatgattataaataaagtttgcaacatacccacaaataattagcaacaacgatacaatcataatttctctaattccggtatgaaaaattgtccgcattgttggcattaacgccttaggcaaactcttcgcagattctgcgtcactcaacttattcatcatggtcatcgtaatattgtggtgtccagcaattccacgtgctagagctaaattcataatcaccccataaacggcagccataatagtttgcgctaaaattctaatcaaaaaactaagcgatgtagcaggtgccatatccttttcaccagcgtcaatctgcacttttatttgaagaataacgaagattgagcctacacctaaaccagataacgctgcaatcgacatcaaaatctgatatggcgtactaattggtacaataattaaaccgattactgttattgcaatcaatgtaaaatcgaaaattaacaaatgataattattaaaatgtctgagtaaatgcggcgtactttgtgaaccagcaatatcaaagattgagttaggaatcaacgtcatcccaccgattaaggccgttgtccctaagattgcctgcgaccacatcggcaaataagtgttaactgcaatatatgcaccccaggcaaaggcaaaaagaatgaagtcaccaactaaagctttattagtaaaaaccgataatggcacgataggactagcagcttttttctcaactaagatgaaccagacaagcattacgatcccgataatcacgaaaatagccactagaaaattactagctagtcctaacatctgaattccaatcaaaaagcaagtcaaaccgccaattagggtaaaagcacctagtcggtcaaagacagtattgatgtttggcttacgaatgccacgataaaaaagaaaactcaagataattgataccaatcctaatggaacattgatataaaagacccagtgccaggacaaagcatcaacaatccagccaccaactagtggaccagcaatacaagcggccgaaaaactagctgcaatataactcaagatgacagttctacgtttaatattcggataaatataaccaacaatcacataaggaagagaacccattccaccagcaccgacacccatcagtactcgagaaacaaggaaaaagtaaatatcgggagccactccttctaaaactgaacctaaaataaataaggctagtgacagttcgaaggcaaatttgttacccattctttcaccaattttactccaaattggcactgagaccgacattcccagtaaaaaacaggcaacaatccaccccatatactgaattccgtgtagatcggacacaattgctggaatcgccgtattaataattgtcgcatctagccctgacataatattagccagcaacaaagacaaagtaaccattgatatttgcttcttagtcatttaatcccacctttttaactctaaaaactactattactcatagtatgcaagatttaactagcaaaataaagcacaatatttttccactaaatcttgacaatctgtgtttttccgagttaaatataaagaaaataatagtgatgacctttaaagttagtcccgtgaggctaagaaggaaatctgcacaagctaatactttttgtcgttagctaatacagaaggaccatcttgagccatgcgctcttggtggtctttttcttttggtcatccagaaaggaaaagctatggcaaaagaaataatcgatgctttaagcatgaaacgcgccttgatgcgaatgacctacgaaattgtcgaacgcaataaaggtactaaagatcttgtattagtcggaattaaaactcgcggttggtacttggctgagcgaatcgccaaaaatttgaaaaacttggaagatgttgaagtccctgtaggggcaattgatatttcacaatatcgcgatgatttaccagaggctgagaaggaaaagatgatccacagccaacaacttgacttcgatatcaccgataaaaacgttatcttagttgacgacgttcttttcacaggtcggacaattagagctgcccttgatgcgttaatggatcaaggccggcctgcaaaaattaatttggctgttctagtagatcgtggtcaccgcgaattaccagttcgtcctgattttatcggtaaaaatattcctaccgcaatgaatgaaaaagtccaagtctcaatgaccgaagtcgatgagaaagacagtattgaaatcgttaaataggagttttaaatgaataaaaaagaaaagtacagaaaccctgaggctatcttagacgtttatgaaaagcctgaatttggccaaggcgtactgctatccttacagcatatgtttgctatgtttggttctaccgttttagtgccaattttaattggaattaacccaagcatcgctctactttcatcaggaatcggtaccttggtccacatgctcttgacccacttcaaaatcccagcatacctcggatcaagttttgccttcgttgctacaatgcaagccttaatgaaggctgatggctacccggcagttgcccagggtgcgatcgcttctggtttagtttacgtagttgttgcgatcatcattagcaaaattggttcaggctgggttaacaaagttttaccaccaatcgtagttggaccaatcatcatcgttattggtttgtcattagcaactactgccgctaatgacgctatgatgaataattctaagtatgatttgacttacttcggtgtagctatcttcactttggtcatgaccttagttttccaaatgtgcttcaaaggcttcaccagtttggtttcaattatgctaggaattatctgtggctatatcttatcctgctgcctcggaattgttgatttctctggcgtggaaaaagcagcttggttcacattgccagcacttgatgtgcctggaatcagttaccacttcaaatggtatcctgccgctattttagccatggcaccaattgctttcgttacaatgacggagcacatgggccacattatggtattgaattcattaactaagcgtgacttcttcaagaatcctggcttacacagaacgatgatgggtgacggtctttcaacgattatcgccggtttcattggtggtcctcctaccacttcatacggtgaaaacatcggtgtgttagctatgactaaagtttactcagtttgggtattagctggtgccgctgtttcggccattatcttcagttttgtcggtaagcttgccgcattgatcgaatcaattccaatgccagttatcggtgggatctccttcttactctttggtacgatcgcatctaacggtttgaagatcttagttgatgatcaaattgactttggtgaaaagcgtaatatgttaattgcttcagtcattttggttatcggtatcggtggtgcttacctacaactgggcaatttccaacttacctcagttgccctttccaccattatcggaatgcttttaaactggattttgcctaagaaagcagctagtgaaaaggctcaagaagaaaagattaagaaagaaaaacaagaaggtaaaatttaccaatagatagaataagccatttaaaacccgttagttatcgcaatgatagctaacgggtttattttttactctcactttgcgcacacaatgttgtaagttgtgcgaaagttggcaaaagttagtgtaagttaattgtaaaagcttaagaagctaacaaagccctatatatcaaggcttcgagctactttagtaaaaactttgctctcactttgcgcacgcaatgttgtaagttacgcgaaagttggcgaaagttagtgtaagttgcgagagcaatagtatataatttattgacacaaataaatttaagtcatgaggtgacattaaatggactttttaaacttcaaagcaattacacaaactggtaattttaaaacaccatctgaaaatgaaaacatcgaatacaaagaagctagttggaaattacctaaatcattttgggaaactgttagctcttttgctaatacttcaggtggaataatgagactgtaaaatagtttgtgtaaggatgaatgattccttaaatttatttctttaaacattagaaaaaggagttcctttctcgtatgattggtttgaacaaaaaaacacatacagaaagaagaactccttcatgaatgattttaccaaagattttgctcaagctctattcaatccagacaaaataaatgatttattgcgcaaagagctacaacaggctgttaataacttgttagaagctgaattgactgcctttctgggctatgatccctatgccagaaatggctggaatactggcaactctagaaatggtgcttatttccgcaaagttcatacgcaatttggcccaattgaagtgcaagtgcctcgggatcgcaacggtcaatttcatcagcacacgctgcctgactacaagcagcactcggatatcttggaaagcatgattatcaagctttactccaagggcgtgaccaccagggaaatagccgatctaattgaaaagatgtatggcagccattacagtccagctcaggtatcaaatatttccaagcagatgattccaaaggttgaggcttaccacaaacgcaagctaagcgacaagtttttctgcgtctatttggatgcgacataccttcctttgcgccgagaaacatttgagcgcgaagcagtctatattgccattggcatcaagcctaatgggcacaaggaggtcattgactactgcattgcgcctagcgagaacattgaagtctggacagatatgcttcaaaacatgaaatcccgaggcttaaagcaagttgagctttttctttctgatggtgttgttggcatgaaaacagccttggccaggacttatcctaaagctcattttcaacgctgtttggttcatgtcatgcgcaatatctgcgctaaagtacgcgtcgacgatcgtgaaaagatcatgaacgaattcaaacaggtgcatcaacagacaaacaaagaagaagccacagctgtcctgcatgacttctataccaaatggggcaaggtttacagccatgttatcagaagcttgaaagacatagaaccagatctgctggtcttttataactatcccaagcagatcagagcttcaatttattcgactaacatgattgaatcatttaacaatgtgatcaagcgcaaagctaagcctaaggcagagtttccaactgaacagtcgcttgatgcttttattggtattcaggcaatgagctacaatgaccgttatttcaatcgaattcataaaggctttggtcaggttcaggacaccttagaatcctactttgattaaataaataattaaaaaatcaatttacgagaaagaactatttacacaaaagatttgacagtttcggaataatagtattaggcatagcagaagataagaataaacatgaatttagtataactggtgtagacaatgttgaagacattgaaacacaaattttcaatgataataacaatatttcatgccttaatcgacctgtaatccaaaataatgatgttcagatttctttttttcaaaataaaactattattcaagtaataattcatccagaaccctttaatactcgtccaataactgcattcggtaaagcatatattagaactggtgacagagatcgagtagctactaaagagcaacttaaatattttacagttgaaagtcaaagcgagattgatactcacttactaccttcgacctatacaatagaagatctagatgcagaaagtatcaaagaatatcgcaaaataattgaagaaaaaggtattattaatactaattctcaacttagtgatcaagaattcttatattcaattggtgttttcagaaaagatcgattaagtaattcaaatgaatatcatcttacagatggtggtctccttttctttggaaaatatatttcgataacagatcgtttcccacgttttcaattagactatcaacaatataatagcgataattctaccaactggaatgatagagtttctgcaggtgacatgaattatcccactttaaatatcttttctttttataatttagttttagctaaaatagaaacaaatatacgcatggtgctagttaaatcgttttagttaataaaaaagtccaatcttgttagactcgacttgtaaatagtaataatagaaaagagtctgatctgattgaactgtcttaagcttaagcgttttagccaccatttacaagttagttttaaagatttagtgataatttgtcggcactggtatcgtttgtatgcaccggctgagtttactcatcggcgaaatattgatcaaattaaaactacggacagtctgattttggctttacttatctggcaagctaagacaggaattgaatcacaaagaagattctgtgaatgtttcaattgtttatcacactcacgttttaatcggcgttcacgtcagctattgcaattgatttatcagatacggcaagaaatgaataaaaaggttgacctgaatggacatttcttgatcattgacagctttccggtacctgtttgccaaccaattcgcaactatcgtgctaaaatttttcgcggttatgccaacattggttataaggccaccaagaaaatttacttctatggtttcaaagttcatgccattgttagcgatgacggttacattcttgattatgtcgtaacaaaagcatcagttcatgatgccaaggagacagttgaactgctggaaaatgcccatccatctaattactatcttcttggcgacgaaggctatttaggcaaagaactgcatcaacagctaaaacaaatgggttatgaactttggacaccatatcgtaaaaatatgacaggagctaaaaagcacaatgatcatcaattgatggctattcgcagaacaattgaaagcgacttttcgcttctgacctattacaatgccgagaacaatcgagcacgtagtctgataggctttcaaagccggttggaaattgcaattttagcttataatttggcttattgtctagaaagatttaactagcaccacgcgtacaaatatacctgatccatttattcaaggtaatgaccttagtagaacgtcctatcacaacgatctaatcatcgcagctaaggaagccctagtcaattgtttaatgcattcatattatgatggtatggtaggtgtaaaaattgtagatagacctagttactttgaatttacaaaccctggtactatgcgcgtaagtaaagaatcgtttttacgtggacaatattcctccattagaaatactgaaatcgctagtttattcagacgaattggtgtctctgaaactgcagctagcggtggtccaagaattcttaatactgtgttgcaaaataatttaaatgatcctgaaattaacattgattatgaaatcaatactactcgcattcgtatttttaagacttttgcaattgataatcaggaaaaattaactgaaccagagaaatttattatgtcttttgctagcagaaatcctaatttttcaataaatgatattgttaaagatccgcagaatcattttggtaaacaaaccacgattagaaaatatgtaacttaaacttcccacacgcaaaattgcttgtttcattgtgattctgcgtgttttgacaaatataaaaggcacaagtccttttcattgctataattatattgaccaaaacataatttatttgcatgaaaggcttgtgccaatgtctattttaccatctcctgaccaacaaaatgaacaactattttcaaactcaatcatcagcttcatcaagaagtttcaggtgatcaagctgttgagaaaatgtggcttccgcaaggaaaaaggcattagcctgttcagcttgtttctttacgttttaagcaatgtctttcgtgaccgcagcttatatatgcagctgaaaatggatcattttcaagaaaatttttccaagaactcatattaccgttttatgcgcaacgttcacgtcaattggctccacttcaccacacttctgtctgcgcaaatcattaataaccacttgcgatctttgacttcagaaaaacgggctgattgctttgttgtcgatgattcctacttctctaggaccggcttcaagaaaacagaattagtcgccaaagtttttgaccatgtatcaatgacttacaagaaaggttttcgcatgatgaccctgggctggactgatggagcttctttcatgccaatcaattcagtgctgctgtcttctcagaagctacagaatatgattggcgaaaataaagtttttgatcagcgcaccattgctggccaaagacgtatgcttgcccggactaaaggcacagacgtgatggttaatttaatcgaccaagctatgaaagcaggtcatcaagccaagtacgtgctgtttgacagctggttctcaaatccacatcaaatcgtccagctcaagcaaaggaagctggatgtgattgccatggttaaggttagctccaaaatcaaatatgaatttgagggagaacgcaaaaacatcaaacagatttatcgcagctgtaaaaagcgatgcggccgttctcgctacctgctgtcaatcccagtcaaagtcggacgccaggacaaagacggtgctaaaatagatgcacggattgtctgcgttagaaaccgtgccaatcgcaaggattggctggcaatcatttgtaccgacatgtcgcttagcgaagatgaaattatccgcaactacggcaagcgttgggatattgagggttttttcaaaacttgcaaaagttatctaaaactaagtacggaatatcatggcctgtcttacgatgctttgaccgctcatgttgccatagtttttactcgctacatgcttatgtcagttgccaagcgggacgatgaagatgaacgcacgctaggcgagctgttctattgcatgattgatgagctggcggacattacttttagccattccttgcaattgattactgatgcaatgctggccagcgtaaagcaagtctttcatgccagtgaagcacaaatagctgaattcacggctgactttatcaatcgtttacccaaatacatgcaaaaattgttaaagaaaactagcaaaaataatatagaagcctaaagccaagcaagatcaagagattactggcttatttagtgtgggaagtttaagtatgtaaattcattagtagagaagcatttactatccaatgagaaaattggcaaaaaatatatctacaatttacagaaaaacaatgattatctaaatcgcgttaagcaccttaaacatcttgaagataatttactcaaatagatcattcaaaaagctcaacctacaaaattcatgcagattgagctttttcatcttatttatcttcaaatattctaggcttatcgtcatcaagtgaaacatgcggaatttcggtgttatttgtctcaacttgatccttctcagacaattctgccttcattaactcacttttggctttactagaagtattgcctaaaagtaaagttttctcctgcggcgtattcaccattgcctgtttttctttgaattttttataaacaatcgccgctactgcaccaatagctccagcaacaccgataattgtgccgattaatctcatctttttcatagggatcacctcgtattttgaaatcactttcttattcttaattatatctaattatgaggttgaacacatttttaatgcctattacctaaaactttccgcaatttccggatccatctcatcttctaaaacactgtagccttgatccaaagtcttgatcaatgccatatcctcatcatctagttcaaagtcaaacacatcaaagttttctgctaatctagccttatgaactgacttaggaattactacataatttctttgcaaaaaccatctcagcatcacttgagcagtagtcttatgatgcttttctgcaatcttttgcaagacaggattagtgaaaatgtggttggctccttctgcaaatggtgcccaggcttcaggttgcacgccctctttttccatatattgctgtgatttccattcttgattccagacattagtctcaatctggttcacagccggctttacatcattaaaagtaatcaaatcagctaagcgttcattccaaaaactacttacaccaattgcccgaatgcgtccctctttatataaacgttctaatgctcgccaagtgccatagtaatcgttatatggcttatgaatcagatacaagtcgatataatctaactgcaactttttcattgaatcatcaaaagcttgcaaggtatgatcatagccatacttatcgacccagatcttggaagtgacgaaaatatcctcccgtggaatgctgctatgcacaagtgcatccccaactgcctgttcattgccataaatttgcgcagtatccacaagtcgataacctacttccaagccgctttctacaacttgttgagtttgagctaaatcatcaatttgataaacgccaaagcccaagcgtggcattttgacaccattatttaaaattacatagtctttcatatttcttctcgttttctagttaattattgctatttaattttattttaacatagcccatgaaattcgactttatttcgtgaaacatagatattatttcttaaaattaagcactcaagaaaagcctaaccagcatccctcaacggaattgccagttaggcttcttttatttttcaacttttgcttgataaaatccaaagctcatctgcttcaacattctagtaaaactatcaatgtctagctttttaccggtagtcaaagcttcaaattcaccatcaggatcaaccaatttgcggtcagtcctgtgaaatccatttctttcatagaatttcaggcgactaacacgctgcttataatttttcgccttcttggtaactggctcaatatcaatgacaatttgcttatcagggaatcgatcctctaacatcatcaagatcttggaaccataaccttgtcctcgcaatttttcattaatggctaaataggtcaaatagactgtattatcattctcagcataataagtaatgccgcaaaactgaccatcattataaattgcgtgaaacttaacatttcggtgtaatgacattgctaaaagagaaaacatggagaatctttcccaagctggaaaagccttcatatataacttcttagcgtcacgatatgcttttgtgccccatcgggcgggtttagagtctaaaatagtatccttcttttctaattaaaaattgattgttaataactctgaataatattattatacaaaactttttagctttttggaaactgtcaaatcttttgtgtaaatagttctttctcgcaaattgattttttaattatttattcaaaataagattctaaggtatcctgaacctgaccaaagcctttatgaattcggttgaaatagcggtcattgtagctcattgcctggatgccaataaatgcatcaagcgactgttcagttggaaattctgccttaggcttagctttacgcttgatgacgttgttaaaggattcaatcatattggttgaataaattgaagctctgatttgtttgggataattgtagaagaccagcagatcgggctcaatttccttcaaacctttgatgacattgctataagctttattccatctggcatagaatttgtgcaagacagctgcagcttctttttggcttgtctgttgatgtatctgcttgaattcgttcatgatcttttcgcggtcatccacccggactttagcacagatattgcgcatgacatgaaccaggcagcgttgaaaatgagctttaggataagtcctggccaaggctgttttcatgccaacaacaccatcagaaagaaagagttcaacttgcttcaagcctctggacttcatgttttgaagcatctctgtccagacttcaatgttctcactaggagcaatgcagtagtcaatgacttccttatgtccattaggtttaatgccaatggcaatatatactgcttcacgctcaaacgtttctcggcgcaaaggaaggtatgtcgcatccaaatagacacagaaaaacttgtcgcttagcttgcgcttgtgataagcctcaaccttggggagcatctgcttggaaatatttgatacttgagctggactataatgactgccatacattttctcaatcaagtcagcgatttctctggtagttacgcctttggagtagagcttgataatcgtgctttccaaaacatcagagtgctgcttgtagtcaggcagcgtgtgctgatgaaactgaccgttgcggtctcgaggcacttgcacttcaattggtccaaactgggtatcaaccttgcggaaataagcaccatttctagaattgccagtattccagccatttctggcatagggatcatagcctagaaaggcagtcaactcagcttctagcaagttattaacagcctgttgtagctctttgcgcaataaatcatttattttgtctggattgaatagagcttgagcaaaatctttggtaaaatcattcatgaaggagttcttctttctgtatgtgtttttttgttcaaaccaatcatacaagaaaggaactcctttttctaatgtttaaagaaataaatttaaggaatcattcatccttacacaaactattttacagtctcgctttttgacataatacttatcttccattcaaaatttaagtatgcattaatattatttattttagtaaccagtcaatgacattaacttggctaattccattatcatcataacttcccggatcttcggtaagtaatatcttagggtagttatccttaatctctaaaaaaggtgctatttctctttgataagttttttcattctgaaccgttaaactaacttgatagtattcccgaataccatcgcgaatagcaacaaagtctacttccttttttcctaaatttcccacatacacttcatagccacgtctgattaattcaagatagattatgccctctaatctgttccccatattaggacgcttttgccccaacaacgctcttcttaatgaaggatctaccatataatacttattgttaatttgtaaatactttttaccagcaatatcataacgatcacagcgataaaataaatatgaatctaccaatttttctatatacgccatcactgttgcgcttgtcgctttaacgccattattcgatagcacattcgctaccttagttggagtaattaaattgccattagtatcggtcaaaaaagctgcaatatgttccaacaaggtagtatttcctcgttgcattctagctaagatatccttaaccaagacagtgttaataattccttgaatataagacagataggtattttcatcctctaattcagtagcaaaagggaatcctcctcgctctaaataacgattaaaagcttcttgatgggataactcaggaactgaggctaaaaattctttaaaagaaaagggatatacagggatttcaatatacctaccagccaataaggttgctaattcacctgaaagcataaaagcattcgatccagtgacataaagatcaacattttgcttgataaaaaggctatcaatagctttttcgaaatgagggatgtcttgaatttcatctaagaaaatataattcattttatctggaatcaatcgttgatcaatatattgatacaattttaaataatcagtaattgtagcaagccctaaatcttcaaaatttaaaacttgaatttgttcctgcttaacacctgctttaagtaattgttcctgatatagttttaaaatcgtggacttaccagaccgacgtactcctgttaaaactttaattatttgtttatcacgtagtttattcaatttatcaatgtatttaggccgcggaagcatttttaatcctttcaagttaatgtaattcaaattagtttaattttcacgtcaattttagcatataattcaaattagtttcaatctcttaaaacttctgagatgagttttaatttaatttgaatttactcaaaggcttaccactaaatttaaataaaaagaaagtctgtcaatctaacaaactttcttttttcataaataatcgttaactacatcaacttatatttcttcatcaattcttcgatataagtgcccttaaccttcttaagcatccctttaatcgcaaacttttcaggcattggcaaatcaagatcagccaacttcttctggtcattcaggtaatacatcgcattcatcaacattctgacatcaaatgcggaagcgaagacttctggtacaccgcggtcaatattaagcaaagtgtagacagcttccattgccgtccgaactgaatactctgtcgtaaagacagtgtctcttggagtttcggcaaagttaccaataaaggctaagttcttagaatgatctggaacaacctttgggcggtcgcctaaagctcttggcataaagtaagaagtaatatatggcatgtgaaccggaattgttgtagctgcggcagctatttcaggaattctttcttccggcacacccatgtgatagagccactcttcacacatttcaagcccattacaatcaggcatcgtcttttccacataattacccttggtatcagagaataaaccatataaccaaacaattaattcatttggtttttgcgccttaaagtgtggctgacggctgattgagtaacctaatagccaattagaatccttaatagtagttggtccactagttacgattgagccactgtgtggatcctttttattaacagcttcaataaatggcacaacatcatcattcttaaaggtaatagttgaagacatccgccagttagcctttggaatatccttgcaaaagacatcaggatggccaaagtcttcatcttgagctgctaagttcttccacaatcgccagcttgcacccaattcatgttctgctggagcgtgatgcagttgatctccataggtagtactctcagtaattgaaccattagtaacgaagactaagtcatttggtgttaagtcaatggtcttcttttcgccatcttcggttaaaataatttgtttagcaaccttttcgccgtcagagcggttaacaaagatattatcaaccaccgtattatagtggaagattacaccacgatcctttaaatacttgaccagcggcaaaatcaatgattcatattggttatacttggtaaaacgcaatgatgaaagattcttcaaggttgctacatgctgtacaaagcgcatcaagtagcggcgcatctccatcgcacttgcccatggttcaaaagcaaacattgttgaccaatataaccagaagttagattcaaagaattccttagtgaagacttcattaatcttcttattttgcaagtctttttcgggagttaaacaaagatcaacaatttccttcactgcctttggtgtcaaaagaagttgcccatcagtcggcaaagcttgaccacgatttacaattactctagttttagcataacttggatcttttctatttaaacgatagaaggaatccaaaatagattcaccttcatggtcaggcgaagggattgatctaaataaatcccacaaacattcaaagtgcggctccatttcacgaccgccacgaatgatgtaactttccttttctttattatagatcccatccattgagccaccaggcagacctaattcttcaaaaatgtgaattttcttgcccttcatttggccatcacgaattaaaaagacagcagtagctaatgcagccaagccactaccaacaatataagcagatttttgatcaacatctttaggtttatcagccttaacaaaggcttcataattgccattactataatgcataattgacacttctttcaataatcgttacacttgtaactatttatgcttataaaataatgtaagcggtatcagttgtcaaacattttacatttggggatgatcttgatgaatatgaagagtctgcatacgcagcaacaaattgaacatgcattattcaaattactacaaaaaaagccttatacggagatctctattgcagaaatcacccgtaaggctaaggtatctcgtacttccttttatcgcaattatgaccaaaaagatgaagtcattgcgcaatttttatttaatcaataccataattttatcgctgatattgatcaacataatttgagaacttttaagcagcagcttactgcctaccttgaattcttcaaagataatcctcaactaatgaaattactgcttgatgcaggatttgaaggagaattacttaattttcaaactaaatatttgaaaaagctgatgtcagtttaccattctgatgtccacctacccgactatgcaatagcctatcaatctggtggaatctatatgctgttagtctggtgggttaagcaaaattatcagaccagcttgactgatttaatcacttatgccgaaaaacacattatgctgtaactaaaaaagaagagctcacaaatcgagcttttattttcaaaattattacaatttcttgcattttttaccaaagttaaagtagaaattcattacaaaggcgataattaacaaaatcaatgaaaccaacataatttccttaataccgccgtggaaaatagttctcattgttggcactaagttttgcggcaaactcttggcactttgcgcatcactcaatttattcatcatggtcatcgtgattcccttgtgcgtttgaactccgctggcccagttcagattcataattacgccataaacagcagccattactgtttgagctaaaattctgatcaaatatgaagttgaagtggccgttgccatattctttagtcccgcatcaagttgtacctttaattgcaaagcaacaaagataaagccaaccccaatgccagaaaatgcaccaataaaggtcaacatctgcacaggcgtatgtatgccagaaataaacaaaccagctgatgagataatcatggcaactattccaatcaaaactaatttaaaggttgtcatatgctcctgaatcgctgctacactttgagatgcgataatttcaacaatcgaatttggaattaacgtcatcccaccaattaaagctgacaagcctagtaatgcctgagcccacattggcatataggtgtttactgctaaaaaggcaccccaagtaaaggcaaataataaaaagtcgccatctaaatctttatttttaaataaagaaattggaataattggattgtctgcatgaccttcgcgaataaagaaaaagacgatgaagactaaactaattataatcaatccaattatgatccagctagcggttaaaccaactagttgcacgcccatcaagaataaaagcagtccgattactaataaagtagcaccagggatatcgaaaaccggtgtcttttttggagtaaccggtttgtagtaaattaaacaaatcaaaaatgcaattaagccaattggaatattgatatagaagacccagtgccaagagaaagcatcaattaaccaaccaccaacaagtggccctaagatcgcagccccattccagctggcagttaaatagcctaatactttggttctcgttttaatatttttaaacacataaccagcaatgatataaggtaaagaacccataccacctgcaccgattcccatgataaagcgagagcacagaaagaaaataatatttggcgctatcccttgtagagccgatcccaaaacaaagagtagcaatgaaagctcaaaggctcgtttgttagtgattttctctccgatcttggtccaaatcggaatcgaaatcgacattcctaataagaaaattgccacaatccaacccatgaattgaattccgtgcaaggccgcgacgatggctggaatagcggtattaataatagttccgtctagccccgacatcacgttgccaagcatcaaggctgccgtcaccattgtaatctgttttttattcatgcttaacttctttctatggtatgtaaaaagcgttagacaaaaatttctaacgcttttgagtaaaaaaatatggaggatacagggctcgaacctgtgacctcctgcttgtaaggcagatgctctcccagctgagctaatcctccattatggggcggaatgtgggaatcgaacccacgcatgctggatccacaaaccagtgtgttaaccccttcaccaattccgccatcaacggtccatatgggatttgaacccatgatctcctccgtgacagggaggcgagataaaccactgctccaatggaccaaactagaggaggatgtgggatttgaacccacgcgcggcagaaccgcctaacggttttcaaaaccgtccccttaagccacttgggtaatcctccatagccgaacagatactagtataccaaagtgagaagataacgcaagaccttttttaaaaaaaagcaaaaaaataaagcctttcggcttcattaactatgtaaatttttctggaacagcaaatacttatattctttgccagcaatttcaataaaacgttgggtagcaatattacgccagccaaagtgcttaaagaattcttgtgcatctttatcttcagccagacaccacaagtaaatcttgccatagcccatcttcttcagttcattttctgcggcatttagcaaggtcttacctacattgtagccttgaaaatcaggtttaacatataatgccatcaactcaccgcagccaagcattctagtgtcacgtggacgaccatagctaacggctgcttgaacctcgttattatcgtctttaaaaactaaattatgacgaccactctcattgagtcgttttacccaagcagtagccggaatattatccaaaaatacatctggtagcacgcctttatacgtctcttgccaagttgtttggaaaagcttacttgtttgttttgcttcgtcttcactaattaatggtttaataatcatatttacttcttctttgtcaaaacagtcacagcctctacatgtggcgtttgtgggaacatatcaacaggatcgattcgcttaaattcataaccttgttcttggaacaaaagcaagtcgcgaatcattgttgcaggattgcacgaaatataaacgaccttcttaggtccagtcttaactgtcgcattaataaattcaggtgtcaacccttttctcggtggatcaacaaaaaccacatcggtcttcataccctttttagcccaacgcggcattatttcttcagccttgcctaagtaatactttgcgttttcaataccatttagctcggcattgtccttggcatccttgatcgcatcccggacaacttcgattccacgcacggccttcacatgcttagctacactcaaaccaatcgttccaattcccgaatatgcatcaattactacatcatccgaacctaaatctgcttgcttaatcgctaaatcatacaagcgcggtgtttgcagcgaattaatctggaagaaactttgaggtgaaattctaaactttaaatcaccaatttgatcagtaatctggtcattaccgaaaactaggtaatcctttttacccaaaatcacattggtcttcttaggattatagttcaagactaaacctgaaaccttaggaatctggctaatctcagctgcaacacccatcatttgtgggaaatccttaacccggctgaccaaaatgaccattatctcgccattagccttactacgacgcacatcaagatagcgtataattcccgtattgtttacctcgtcataaggcgcaatcttgtacttgcgcaacacatcacgcactgcaaccaatacacgatcaatttccggatcagtggtaaagaaatttgtcaaaggcactaaatcatgtgaatgtcgtctaaaaaagccaatctcaagctgtccattatattctcgcacaggaacttgggccttgttgcgataccctgtttgctcaggactaggcaaagtttgtcctacttcaatctcatctaaatgtgccttcttaagtaagttaacaacttgattacgcttgaattcaagttgcttatcatacttgatatgagctaaagaagcgagtcccgtttgaacccattgattcaacttgatcttaactcgatcaggactttctttttttatttcttcaattttagccaaagcaaagttcttcttaacctttaaaatctttgcactaaccacttcacctggaagtgcattagtaacaaatacggtcattccctcgtaatgggccacacccattgcttcatacgaaagatcggtaatttctaaatctataatttgattctttttcatactcactcaaccttaaaaaaatagctctctattattataatacttgaccaatctttgtgcttcaaaaaataatcgactgctttttagaaccaactatcacccatatacgcatgcaaaatgtggttagccgctactttcaacctcaaataattaatattattagaaaatagcataatcatacgcttggtcttgtaattcgcaacaaagcagcaattataaccagggatactgccattagcgcgaatgatgtcaccattaaaatacactccaccaaaataagctaccgtctgatgctgggcttggtggtaatactcgtttaccattttaggatttttcagcacatcgttatatacaaacttccaataatcaattggtgacatgaataagttccctgctccaaagtccgacgacgtcgtcactgtcacttggtgccagtcaacatttttactcattggctgagggatctcgttttggttaacctcagaaaaatccttaactttctggagcttaagtggcttagcaaaatcggtctgaatataagcattataacttaaattagtttgtttgctaataatagctgctagcaattcataatcaacatcttggtaatcccaagtatgaagatgatcattctccatgtgattaagcatataagctatttgctctttctgatttttaagcggagaagatggtcgagcattgttaaccaagccactagtatgattcatcagctcacgaattgtaatatctttactacctgaaacttgaggataatagttagataaagaggtattccaacctaataacttttcttgttgcagctgataaattgcagttcctgtcataattttttgtagcgaagcaatcggaaacaattgattagcgttaactatttggcttgaatcagtggtctccttattttggacaacaatcggttgcccctttttatcattaattaacattacaccgttgatatgatgaaacttcatataatcatgcagctgttctttctgattcttaatgccattatccagcttatcccctggctgcacaatgaataaaaatattgcaaaggcacaaagtgccaaaaagatggataaagctcgttttttatgcataaagattcctcttaattactatcccaagcaatgtaataactatatttcctcaattgtaaatctagtatctaaatagattcaactattgtgtgattttatgcaatgaaaaaacatgcttcattagaaacatgttttttcaagtcattttaataaaaacatgaacagcataattaccgcaataaatttcactgctcttatttcatgcactatactaaaaatagcttttctataaatacgtcacattcaaaaagattttgcttaaatctattgacagatatttttaatcttgctatcatattgctcaacaagaaacgaaaagtagcaactttgctcagcgttcagagaactggtggtagctgcaaaccaggcaggcaaagcttgacgaaatacatcgttataatgttgttcggaaaaattcagaaccgttaccatctgatagagattcaagttcttatgcttgaaagagtgggtggtaccacggctattgtcgtcccgttgactaataagtcaacgggattttttatttggaggaatataaaaatgaagaaaaagaaagtttcctttactgaatcaattattatcttaattgcactcctcactattctgggattggcagttatcaagcttgccctttctccagaagtgccagttttattcattgtccttttacttaccttttgggctagactgcgtggcttttcctggcaagatgttcaagatggcatcaaagaaggaattagtgtagccattattccgatttttatctttattttaatcggcgctttgatcgggatctggattaaagcgggaattatcccttccatcatggtcctgggtttccacttaatcagtggtagtttcttcgttccatctgtttttattgtttgttcaattattgggatggcaatcggtagtggttttaccacaatctcaactgttgggattgcgctttttgggatcggaactagtatgaaccttaatcctgccttagttgctggggcaattatctctggagctgtttttggcgataagatgtctcctttatccgattcaaccaacctttcttcagcagttgccgaaagtgaattattcgcccacattaaaaatatgatgtggtcaaccattcctgcttttgtagtttcattaattttattctggatcttaggcaacagtggcaacatggatccaactaagattgaacgtacttcacatattttacaaactaacttcagtatcagctggtgggcaattgtcccaattatcttgatgatcttttgtgcttggcgcaaaatttccgcaatccctacgctctttttaaacattgcgattactgtaatcatgatttttattcaaagtccccacgaatctattcaatcgcttaacaatttagttatgaacggctttgtggctaaaactagtgatgcttctgttaatgccttattaacccgtggtggtatttccaacatgatggctacagtagctttgatcatttctaccttatctttgggtgggatgctcatgaagttcaacattgttcaaagtgcaatggaaccactcgttaaacatttaaccaagcctggtcgtttaattacggtcaccattttatctggtatctgtatcaacctttttgttggtgaacaatacctatcagttatcttacctggtcgtgcatttaagccggcttttgataaaattaagctttcaccattagcccttagccgcgtacttgaagacggcggtagcgtaattaactacttaattccctggggtgttgccggttcattcgccgcttcaactttaggtgtgccagttttacatttcttaccattcgtcttcttcagtcttctttcaccaatcttctctattttgagcggaatcaccggaatcggcttgaagtgggctaaagaaaagtagaaaataatcatatcagtaaaaaagttcctaagaccatcgtctttaggaacttttttacgcaatctactagctaacggttgtgtcatgttgcaaccaattattactcttttcttgacattaccattcgatcattcacagcagctctttttggtatcactttataacctcgtcaaattcacttcaccagccttcatttttgggattgtctttaccgtaattaggaaaaatgaccagcaggcaaaattacctttaaaatcatatttttccgaccagtgggataataacttctttcctacttttgcttggactttattttatctcattgctatgcctaatctgcagcaacacgggcattttcacaatattgccacattcatctggcaattcttcagtgataatgccacacctcatctttggtacagcgtcatgatgctgcaatttttgcttatcatgcctggaatcaaatcagtctgcaactgggtccagcattcttatcgacgactactaatcgcagttattagttccggaattatttactttgcctggttaattttttatgatcacttcattttaaatggtcccgaggctacccattggtatttattagatcgtatctttatcagctttttgatctttgggctctacggtggcttaagctggaattttcatcatgaaattcaaacttttctgtttacatattggtggctaattgtgggattttaccttttaacctattttgggaccagagatttatttttagccactttcaaattaacagacctaaccaacgacagttattacctaccttcaatggcaatttatgctttagcggttatcctcttgatttacctaatctgtattgcacaaaaagtctttaatatgaactactggctaaaatcaattcactttctagctttttatgcttatcgagcatttttagccaatgttttttgggatcgtatcttttggcaatattttaattttaaacagctagctttacaaaatatttatttagctgtcttactactttggatttgtacatggtgtgcttcatatttatctgtttatgtagttcaccacctttggcttaaaattaatggttctgtcggtccatcctaatttgcgcacgtcgatattcctgactgtcacgcgtaggttgagcaactatatctgtaattattatttcatgatcatttcgttcaaagacgattgcttggtctaattccgcatttacttttttattgatagtggtatcttgattaaattttaaatcatccagctcccgatcaataaatgttttttgcgaactcgtcagctgatgatatttttctgccgcttctggagtaaaggacaagatcgtctcccgtctgaattcacctattttatctggatattcacttctttgaccacggatgtcattgtcaatatatcttttttccatcaaaatcacttcctttatatcttcactatacaggaggcgattttctttagacatctttctgcctactttagttttttcataagaaaaactttactattattcatttgaccactaaatacggtaaaatagataagacaagtaaataaaaggagtgtatatttcatggataacttttcaaatactccaggacggcgtcaagtccaggatatttctgcagttaacagcttcttgactaagatgtacagtctcatgattttggctgttttagtttctgcagcaactgcattcttgactacgactgtgtttgcatctgcaattgctaacatgtcacaagccgtttactggatcatcgtatttgttccaattgttttatgtatgacaatcagctttaaggcagcaaagaacccaacattaggcatcgttcttctgttgattctttccgcagtctacggcttcgaatttgcctttatcgcaggagcatttacttccgcttcaatcgctggtgcctttttatcagcagctggcgtgttcgcagcaatggccgtcttcggttctgtaactaagcgcgacttgagcaactggggttcataccttggcgcagctttgatcgggttcttagttgcatggctcgttaacgccttcttcattagaagtggcgctgcagcctttatcttctcctgcatcggtgtgttaatcttcactggcttaactgcctacgacgcacacaatgctaagaagattttcatgacctacggcggtcaagtttcagatactggtttagccgttatgggggctttaagcatgtatctcgacttcatcaacatcttcatgttcttgctacaaatctttggcatgggcggagatcgcgattaattaatttccatacaaacatagcgttgattagcttttacactagtcaacgctatttgttttgcttaaattttatccaccaacataaaattcgatatgttgttgtaaattgttgaattcaactggacaataaccaccaatttcgccatcaaggttaactggcaaatcttgtccttcacttttaccaatcaattccgccttcaagctgcgggtcttggtataaatgatatttggatcatcaacgtgcttaccattcaaagccaatgccatcaacttcatcatgctaacagggtcagaaggcttgaccacgatcaattggaataatccatcactaagctgtgcatcaggcataacttgctcaaaaccaccaattgaattagtcattcctagtaggaacattgataattttccttcataaacgccatcatcataagtcaaacgcatctcattctcagtcaagtgtggcaacatttctgcccccttgattaagtatgcggcataacccaaagctgacttaacctcagatggtacgccatatgttaactcagttaaagaaccgctggcagcaatattaacaaaatattgaacctggtcaccaaaaacagctttaccgatatccattttacgagttttattctttaagattactttagcagcatctggaatattatcacgtggaatggctaatgcacgagcataatcattagtagtaccagcaggaataattgccattttaggcctgttttctaaaaaggcaatcccgttaactacttcattgattgtaccgtccccgccagctgctacgattaaatcaaaaccttccttagcagcacgagtagcttcattgcgagcactattttctttaggtgtagttctaaaagcactagcttcgtagcctgcttgttctaatacatctaaaatatcggccacattctttggcatctgttcgtgacctgatacaggattataaattaatcttgcttttctagtcataattactacctaacgttctaaaaattaacgactttgcaattcttggttaagtaacttgttaaccatcttagggttagccttaccacgagtttgcttcatgatttgaccaactaagaagccgattgcacgatccttaccattcttaaagtcttcaactgattgagggttatcatcaacaaccttcttaaccattggagctaaaacagaagtatctgacaattgaaccataccattatcttcaacatacttcttaggatcagtaccattttcaatggtttcagcgaagaccttcttagcaatcttagatgaaatagtaccatccttaattaacttgatcatttctgccaagtgttcaggcgttaacttaatatccttcaattcaacacggtgatcgttcaagtaaccattaacttgtgtgttcatccagttagctgccagagttggatctgcacctgccgcaacagcttcatcaaagaagtcagaactttccttagtttgaagcaaaacgttagcgtcatatggcttcaaaccatatttatttacatagtcatcgtaacgagcaaatggcccctttggtaattccttagcaatttcatcgatccattcttgtgaaatatgatctggtgcaatatctggttctgggaagtaacggtaatccgatgcaccttccttaacacgttccaaaacagtcttaccagttgcttcatcaaaacgacgagttgaaagttggatgtgaccaccagccaaaagaacttgttcttgacgcttttcttcatatgcaagtgaacgacgtacgtgatcaaatgagttcaagttcttcatttcaaccttagtaccaagttccttttgacctgcaggacggatagaaatgttggtatcaacacgcattgaaccttcttccatcttaacgtctgaagcaccagtaaattgaacaatcttacgtaatttttcaaggtatgcgtaagcttcttcggggtcttccatgtcaggttcagaaacaacttcaagcagtggaacaccttgacggttcaagtcaacgtatgagaaaccgttggttccgtgagtgttcttaccggcatcttcttcgatgtgcatttcgtggataccgattctcttcttcttaccgcgaacttcaacttcgatgtaaccatcacgagcaagtggttggaagaactgagtaatctggtaagccttggggttatcaggatagaagtagttcttacgatcaaaatgagtagttggcaaaatgtgagcgtgggttgctaaggcaaccataatacctaaacggtaaacattcttgttaaccattggcaaggtaccaggcatagcccagtcaataacattagtctccgtgttttgttcagcaccataggttactggtgaaggagagaaaatcttgctctttgtctttaattcgaagtggacttcaagtccgatagtcgatttaaaattcattcaattagtcctccattccagttggtgttttttcataaaacttgttagtgcgttcgataaagtcagcagtcttgaagacattaccttcatcaaaacgcttagccataacttgtaaaccgacaggcatcccatcaactaaaccagctggaacactagctgcaggaatacctgctaagttggcagaaatagttaaaatatcattgttgtacatcttaattgggtctgaaacttcttcgccaataccaaatgctggctcagtagtagttggtccaacaattacatcattttctgcaaagatcttgtcaaagtcatcacagatcaaggttctaaccttagcagcttgtctaaagaaacggtcatatgaaccagctgaaagggcaaatgaaccaagcataattctacgcttaacttcagcaccaaagccttcagaacgtgatttaacgtaaacatcaagtaagttcttagtgtccttagcacggtagccgtaacgaataccatcgtatctttgcaagtttgaagaagcttcacttgaagcaatgatgtagtagtcaggaacaacgtatttagtatgtggcaatgaaacctcattgatcactgcaccagcatccttcaaagcatcgatttgcttttgaataacttcacgcatttcgccgctaactgcttccatgtattccttaggaacagctacacggagacccttaacatcttgaccgataaacttggtaaagtcaggtacttcacgggttgaaacagttgagtcatgctcatctgcaccagcaattacgtttaatacttcagctgaatccttaacgcgcttagtcattacaccaatttgatcaagtgaagaaccaaatgcgataagaccccaacgtgatacacgaccgtaagttggcttaataccaaaaataccgttaaatgcggctggttgacgaattgaaccaccagtatctgaaccaagtgctgctacaacttgaccactagcaactgcagctgctgaaccaccagatgaaccaccaggaactttatctaaattccatgggttgtgagtagcaccataatatgagtgttcagttgatgaacccatggcaaattcatccatgttggttttacctacaaaggttgcaccagcttttttaagcttagaaataactgttgcatcatacattggcatgtagttgtacaaaatgtgactagcagcagttgtcttaatcccgttagtgatgatgttatccttaattgcgattggaatacctgctaacttactcttggagtagtcaaggttatctgcaggcttagcatcatctaaaacagtgatccaagcatttaacttcttatctgtatccttaatgtttgccacagtgtctttagctaacttatctgctgacaagtcaccgctggcaagctttttgtttaatgaatcaatattttcgtttaagtaattcattactcgtcctcatccttattaataattacaggaaccttaatgtagccgtttgccttttcaggaacgttagccatcaatgtttctctgtcttgtccttgccagtgttcaggtttatcttctctgaagacagtatcacgatcaacaacttgaactgtttcatcaacaccctcagtatcaacttcactaagttgatcagccatattgataattgatcccatttgatcagtaaatttatctaattcttcttcattaaacgcaagtcgcgaaagagtcgcaacgtgtttaatggtatcttttgtgatttccacgcaaatacctcctattcgccgccataaacatggacttgataatcactatcgccggtttcttttgcaactaaagcttgtacatcatctactgaaccaattttgatttcaattgggatattgccagacaagtactttttagctgacgacaaaaccaaacgggtaaaactttgaatttgttcatagccataaaattgcgttgttacggaaatgttttcttgtgaaagcttaccgtttgtataacgcaaagttgccgttaccccactaatattagggaagtagttttgaatagccgtcttgaaatcattgaagtgcgatgcatcatcactgttaattgctttttcactaccagttgtcggtaaaacttgcattttttccgacatggatttccatttagatattttactactattagcggccgctgtcccgtaagcgaagtaagttccaccaactaatgaatcttttccagtcttggagaataaaccaatcgtaatcggaatattctttaaagctttcttcttacgcaagcgagcaacaatttcattagctattttttcaccttgagctttttgttcagcacgtgaaatagtagtttgaaattctgcaccgttacgctttttctgataataatcaaccgaattcatggctaagcccaagctcataccacctaaattatacttggaaccagatccagtcaaataatcttgttcgataatttcttccaaataaattggattacgcgtatcggttccggtcttaccattatttactgggtttaaaccatcaggatttgatttggatttacgcattaaccaatcagttacagttgaggtatccaaatattgtccttcttggaagacgtattgattaggcgaaaattgattcttagaaatttgaatcagccctcgctctaattcacgcgtatcaacagaattatcattatcagtagctgttaatcctgcaatcggactaatattatagcgaccatttttcattaaaacggtatagccattcgttcccgtgttagtagtttgatagctttttttcttagtggttgaagtggttgtcgcattatttgctaaactagaatccttcaacttaccacaaccacttagagtaagcgcgattccagctaaagccattacttgcaaatattttttcacaataattgtcctttattcaatttgtgcaattgcttcttcttcagtcaaaagtggtacgcctaaagtctgcgctttagtatacttagaaccagcatctttgccataaatcacgtaatcggtcttatgcgaaactgaacccgtaactttggcacctaaagcttgtaattttttcgtaaactcacttctagtataatgctctaatttacctgttagcactacagtcttatccttaaatggattatcttcaatttctgcaggctcatctgcacctaagtaatccatattcaggccgctctcacgcagctcatcaattaccttctgtgcttctggttgagcaaaatatgttgtcattgattccgcgatcgtcatgcctattgtatcgatagaagctatttcttgcacgtctagagacataatctttgccagatttttaaacttttgagcaattaagcgtgctgctttggccccaacatggtcaattcccaatccagtaatcaataattcaactgagttttgctttgaattgtctaaggcagttaacaaattattgatcgatttttccttaaaatgatcgagttgtgctaaatcatctgcagttaagtgataaagatcagccacattatgcactaaatctttagcaatcaattgtttaacgatctttggccccaaaccggcaatgttcatagctggtcgagaagcaaagtgcgtaataccctcctcaacttgagctggacaagatggattgatgcagcgcaaagctacttcatcttctaggtgaactaatttttgcccacaggatggacaagtcgttggaatctgataagctacagaatctgccggtcttttagccatgacgacttcagagatttctggaataatatcgcctgctttatgcagtttaacggtatcaccaatcctgacgcccttttcattcaaataatctgggttgtgcaatgaagccctagctacagttgtaccagctagttgcaccggatccatgaccgcagttggagtaactactccggtacggccgacagtccaaacgatatcccgcactacagtttcttgttcttcaggtggaaatttataagcaatttcccagcgaggcaccttaacagtgttaccgagctcttgttcaattcctagatcatcaatttttaacacaatgccatcaataccatatgttaggctgtttcgtttagctgtgtattcatcgataaaggcaaaaacttcatctaatgtttttaacttacgaccggtttcattggtatgaaagcctaaatcatgcattttttgaattgcttggtgctgactagtaatttcttcaggcggattaacccaagtataaataaaggtactaagttgacgcttcttggtaactttaggatcaagttgacgcaaagaacccgctgcagcattacgtggattagcaaaaactactagaccttgctcttctctttctgcattcaacttggcaaaggcttccttgcccatgtaacattcaccgcgcacttcagttgttaacggttcaggcaaagtctgtggaatatcactaatatacttagcattagctgttacatcttcaccaacataaccgttaccccgcgttgaggcacgaaccaacttaccattttcatattcaagcgatagtgataagccatcgatctttaattccacgttatattcaactggatgaccaactaatttttgcatccgttgatcaaaatccttcagttcagctttggaaaagacgtcccccattgacagcattggaatcgggtgctctaccttggtaaaatcactatcaatctgtcccccaactctttgggtaatggagtcgggtgtcacaatctctggaaattctttttctaattcaagcaagcggttgtagctttggtcgtaaacattgtcttcaacctcaggcgcgtccttagagtaataggcctcagcccattcattaagctgttttctaagtgaagccgcttcttttttagcttcatcaagagtaatttctgccatttttccctcctgatccaaatcaatctttctttaattatatcttcttaattggcgcaaaggcagccaaaagccgtttgattcctttaccagggaaagcaatatccagctccatatcttcaccagtgccattaactttagttacaacaccatgtccccaagctttatgctcgacttggtcgcctacattccagcccttcttttcagcaccgacagcgcctgaagctttcttagcagtataaacttcagcgcgagctcgttcggctttgcgagcaaatggtgccgtctgtttctcaaagctagattggataaagctgctttgtaatttttcattttcttctttgtgcagatcctgttcatcaatttcgtccaagaatcttgaaggcggattattttgcattctgccatacatcatccgtgagtaagcattagttaaaaacagttcttgcttagcccgagtaattcccacgtaagctaggcgccgctcttcttctaattcattgtcatccatcattgcacgttgcaacgggaaaagcccatcttccatgccaattaagaaaaccactgggaattctagtcccttagctgcatgtaaagtcattaaagctacttgattgtcatcttcatcaagatcatcttgatcgctaagtagagatacttcagccaagaagtcgcttaatggattagactcatcttcttcgggctcataatgatcatcaaaacgcttagtaactgacaagaattcatccaagttttctaaacgcgtttctgattcaattgtattttcagctcgcaaggcatcggtataatcaaaatcagctaagattttttcggttaaaccggttactgtaccattttgagcataagcaattgcatcacgtaatttagtaccaaaatcgcttaatttcttggctgctctagtattaattgaactttcagccacatgtcccatcgcatccaaaatgttgtagtgattctcatccgcaaatgttaacaacttatccacagtagcggcaccaattccccgctttggagtattaataattcggttcatactcatcgtatcagctggattagcaactaacttcaagtaagccatcacatctttaatttctttgcggtcatagaatttatgtccaccaacgatttgataaggaatattgcttttaacgaaagcttcttcgactgttctagactgagcattagtccgataaagaattgcgaaatctttgtaagcccgttttttatctttaacttcttcttggatctttgaaatgatgtagtgagcttcatcatcaccgctttgggcttgatagtaggttaccttttgcccatcaccttgatcagtccacaagttcttagccttccggttctggttatttttgatgaccgagttagctgcggacaaaatgtgaccagtagaccggtaattttgttctagcttcacagtcttaacatcatatttcttgtaatcctgctcaaaattcatgatgttttccatattagcaccgcgccagccatagattgactgatcggcatccccaactacacaaatattcttgtattgtgcagccaaagcatgacagagttcatattgagcctggttagtatcctgatactcgtcaactaaaagataacggaacttgttttgataatagtgcaaaacttcgctatcttttttaaacaaaactagggtctgcataatcaaatcatcaaagtccataatttgatcacggcgcaatctacgttgatattcttcatacaccttagccgccatcttctcaaatggtgacaatgcactctgcataaaagcttcaggatccagcaagtcattcttgccattagaaatcgcggctaaaataccgcgtggatcatacatcttaggattgatattcaagtctttttcaatatgcttaaccaaagttaattgctcggccgaatcagcaattgaaaaattatgaccataaccaatcttatctgcatcccgacgcaagatccgcacacacaaagcgtggaaagtcgacatccaaatgtcgttagctgctggtcccagcaacttttgttcacgctcacgcatttcactagccgccttattggtgaaggtaatggctaaaatattccaaggtgcaacatgattttcttcaactaaataggcaattcgtctcgttaaaacagaagtcttacctgaacccgcaccagcaacgactaataaaggtccttcagtggtttctaccgcttctttttgttgcggattcagaccagctaagatagatttttcgctcattattttccccttcactaaaaattatttcattaatgcaacttgaatattataccaaaaaagcagcgactaattcgctgctttagatttacttatcatatttttcaagatcaaactgttcaatcaaattaatcagcttatcggcatagtccggatcagtcgcatagccgtcggtaaccaaggctttagcttgtgtcttataatctttggatgctagaacatgcttatactgatcgtggttccacgttgtcccattctggaataatctagcgtgagcccgaatagaagcctcatatgagtcatatatttggaaacgcgccttcacggtaacccacttattctttacatattccttagttgtcatcactgccgaagtgttcgggttggatcctttaacaccaaaaagattgttgtatttttgcgacaaatcactttgtccataattactttctaggcaggcttgagcaatcgtgatgcttggcaataagtcatacgacttgtccacttcgcgcgcaatcggaccaatttttttgataaagtcttttttctgttttaatagttttgctgcttcctgttctttttgcagctgtgcttgttgaatctgctctgattgaatcgcgtaacgcctataatatctaaagccgacaaaagcaaccatcagaataaatagaattacgaatacacgcacaacggttttgacactttttggtactcttgatttacgttttcttgccatagttttattccctttaattactaattaaagtataaccgatttttgagtaaaaaaaaagaagtcgctcactgcgactcctcaatcagtgcgggcgagaagactcgaacttccacgatctaaagcgatcacaagatccttagtcttgcgcgtctgccattccgccacgcccgcggcacatcaactataatagcctaaatacagttgagatgcaagaaaaaatataaattattttaaatttctgatcattttacgcaaaagtttgcgctaaacgcaggtgtcccctacatttaccacaacgatacttttgtgtattaatcctgcgcattcttgggtatctcaacccacagttttcacaaagatataggtaacgatattttttctttttacgtaagccaatatcaggtgcataacgactgcctccaacttttttcagcaagattttaaaattgcgatcacggtgtcggtaacccaagcccaataaatgcaaatgatagtgggttaattcatgcttaatgattcctactagataatcatgatattgtggtactaaaaaatgcgcgttgatttcaagatggtgatcatccaaatgataacgcccacctgttgtggtcattcgccgattaatttttacaaggtgcttaaaagggcgatcaaaatattttaacgaaattttttcaactaaattttgtaattcattctcattcatggataaaattttattccaaaaataaaaatcagcaagaatttaatctcgctgattttttgctacctaaatatcttggcatacatccccgcctgcttaggcgtactaatgtgtcgtttcaagaaagttactaagtcatgtttgaatgactttttaccatccatccaggttccagtgaataagtgaatcgatttggagtccttagaaggattacacagaactccatctgaatagacatgaatgccatcttttaacacttgctcctgattacctagctttaagccatacttatttaccagcatttcagtaacggaaatactatttactcccgccatctgattcttagtgtcatattcaaaatcacgatcttgataataatccaaaatatcctgcataaatgggtggcctttttctgcaccaaaaattgcagctgacagataatcatggttttcaaaaccaataaaggcagaagcattcaaaagactatctaacttatccacgactctaacatcagtatctaaatatatcccaccttgttcataaatagcccgtgctcgaacatagtctgacacgaaggcccatttttttgcagcataagcttgttcaatataacgattctcatgcatatcaaaattatcttcattccactcaataatttgataatcaggcaattttttcttccaggttgcaatacattcttcaattatcggggatttaggattgtgtcctacccaaacataatgaatttttttaggaatcatttttaacctcgcttcaaaaagttcttaattagcttcacaatatcatcattaaaatcaagcttgaacaagaacatcaatgtcagataaataattaacatgacaattgacttaaaagccatatcgaaaaaggcagatggaattatattaggcataaacattccaatagccaaggttagcaccgcaattaacaaatacttgggcacgtcatggaaaacataactaaattcatagccatcacgtacaacccagagccgcaaaattaaaactactgcttcagtaattaatattgcaatcatagccccacctgcgccatatggcctatctaagagataactcaagacaatttctaaaattgccccaataactactggcacagcataatccttgtctcgctggttagccaaagcaaattggttagcaaataccccgccagtcggaatcatgataattgttaaggtaaaccaaaacattaatggagtcatcggaacatatttattcccaaagaaaaatggtacaaactgtttggtatttgccataataattacggcgaacaaggtacccagcattacagtagcttccagtgattttttcatcactatcttttgtgccttttttccttcgctcgccatcttaggcataatgactagcgaaatactggtaattacacccagaatcatatttgaaattcgttgtgaattgtcataaaaagaaacctgagtcgaattagaaaaccaacccaaaattggtttatccagcgaagtataaatttgagtcgcaatctgtggaatcatcaaagtaccaattgcaattgccgtctgtttaaatttgtaaaaatgagcaatgggttttcctacatagcgccaaatatcaaaccaaaagacaaaggaacctagcattgtcgacactgacatgatcaataaatatttccacaagtcagcgggtgattttacccataataaaattagaaccacactaactaactttaccgccgtgtttttcaaaacaacacgaccaaagtcagctagtccttgaaagaaccatgaaatatcaacctgtgctgagatcaagtatggcaccatcaacaagatataaaaccaatattgaacgtgaaatacagtcgctacaaaaaccgtgactaaaatggtgataataccggcgattccttggaaataccataacccccagaaagcattggttagctcctgcggtgtaccataagtgcgcgtccgtgaaattgttcgcatccctacatacgacacagacagaatacaaaaaatcatcaagaattgcaccgtattgttcacactgctataaatcccataagtcttaggacctaagacacgcgataaatacggtacagtaatcagtggcaccaatacaataaaaatctgataaaccgcattatataagatgtttaaaaatgttttacgcattttaacctcgatattcctgcgtcatgtacttaaagacgttctcacaatatgaatcaccatgcacctggttagtcaaatgtagccagtaaagacggcgattagcaatctgctggttatcaagttgatccagattgcgaattagttcatcctctgaattaacacagattccgggagtaatctcagcatatggtcccattagtaatccgcgcgttttttcatattgctctaaaaagttagtcacaaacacaatcggtttgttcaagtgcaagtaatcaaagtagattgacgaaaagtctgtcatcaagaaatcagtatcaccgagcaattcgtacaaatcataattgtggtcaaacaagtaatcattgttcatgaaagcaatgttagaataactgctcttgaaattggcaaataaacgcatttcatagggatgcaattttacaatcagatattgatgccgcttctttaattctgtatttaatttttcaacatcaaaatcccgaaaggcaaaaaagtttctctctttgattttctccataatggatttatcttccaattcataacgaaaagttggcatatagatcccgatctgtgcctgatcgtcctcagttttaaataagtcagccaacaattgtttcttcgaaattaccggcttagccaataaatccaaacgcggaaagcccagcttgcggtatttttttgtctcaattgccatacaagcactcattagtgattcatatagatcagagctagaagcaacaatatccgcattcttgtgccacaatttttcgttacggcgattgtcgcgtcgcttagtattattagccataattcccatgcgcttgagtggaacgccatgccacaactggacattaatttgatgcttgcgcaccttaaatggttggtgcgttgtaattacatatcgcgctgctccgattttctgccaggttttccacttcaagtgtgacgatggccacggctcaactaatgtaacgttatattcaggatgattcaattgcagccacttgtaaaaagcatagccgttagatccagacctacctgaaccattcaggataaccacattattgttttccatcgtggtaaatctagccaaaaaactcatccaagccaaataaagacggaataaaaagcttttcattaaaatacttccttaaaatagtctaatacctaaagcatataaaaaaagcttgagcaaactcaagcttttttctttatttttgttaaactttattctttacccatttttctctggcagaatttaacaatttcaacaatcaaaaccatcaaaattccggcaattaaaatgactaaccactgtggtccatcaagttcagtcacatcaaagaacttagtcataaatggcaattctaccgctgccataattacagcagcaatgataattgcaccattgaaccacttgttagaaaaagtatgcggtctaaaaatcgactgatgtacatacttggaattaattgcatggaacagctgaatcaagcccaaagtcaagaaggccattgtcaatgcatccccatgttgcaacgatggatcacccacatgtggaccgacatgcaaaccaatttggtatgcacctaaaactaaaattccttccaaaattccttggtaaataattgaactggcaacaccaccgctaaagaagttagacttcttaccacgcggcttgcgcttcataattccaacttccactggttcaacacctaaagcaatagctggcaaagtatccgttaccaagttgatccacaagagctgcacaggagctaagatatcccaacctagcattgtcatcatgaaaactgttaatacttcacccacgttacaactcattaaatatagaatggccttttggatattactgaagaccttgcgtccttgctttactgcttcaacgatcgtggcaaagttatcatcagccaaaaccatatcgctggctcctttagaaacttcggtcccagtaattcccatgccgattccgatatcagcttgcttcaaacttggagcatcgtttaccccatcaccagtcattgcaacaatcttgtcattagcctgccaagccttgacaattctaaccttgtgctctggtgaaacacgagcgtaaacgctgtagtcaccaacatgctgtttgaaatattcatcatctagtttatcaagttcagccccagttaaaacgcggctatcctgacctttttcaataatacctaggcgttccgcaattgcttgagcagttgtttggtgatcaccagtaatcattactgttctaataccagcactctttgcttcagccacggccgctttagcttcaccacgttctggatcaatcattccgactaacccagcaaaaattaaatcttgttcaacattatcagttgttggatcggtgtacaattggtcgactttcttataagcaagccctaagacacgtaaagcttgttgcgccatctgcttgttttgcgctaaaatattttgcttctgcttatctgtgatcggctctacttgaccaccattttcaatcctagttactcgctgtaacaacatatctggtgcgcctttgaccgctacaaagtattgctcgccatctttattaacagtactcatcaatttccgttctgaatcaaaaggcacttcttgaatccgtttgtatttttcaagcaagtcagttacatcaatgttttgatcaaaagcaaattgaatcagggcggtctctgttgggtcacccaataagtctccgccattttcaatcttagtatcattagccaaagtcattgccaataaagctgggttattttcgctaatactttcactattatcatgtaactttttatcatagaagaccttttcaactgtcatccggttctgggtcaacgtaccagtcttatcagaacaaataatgtctgtagcacccaatgtctcaacagcaggcaatttacggacaatcgccttatgtttggccatcgtttgcgtacctagtgccaaaataatcgttacaattgctggcaagccttccggaattgcagctacagccaaggaaacggcaaccaagaacatgttaatcattaaagtagagttacgctctgctgaatcagccttgagcactcctacgataaagacaataacgcagattgccaaaatcatgatggttagggtctttcccagttgattcaagtttcgctttaacggtgtatcagtttcatcagcattgttcaacattgtagcgattttaccaacttcggtgtgcattcccgtactagttacgattccttcaccacgaccataggtcacattagtattggaataagccatatttacgcggtcagctaaagcaatgtcttcaccttctaaagtttctgcatgcttttcaactggaactgattcaccggttaacgctgattcctcaatcttcaagctgtgggcttgattcaagcgtaagtcagcaggaaccacatccccagcttctagtaaaactacatctccaggaaccaattctgtgcttggaatagtaacgattgtatcatcacggcgcacatgcgcatccggcgtagccatttccttcaaagcatcaatcgcagcttcggaacgtgcttcttgaaagacacctaaaattgcgttcaaaatgaccacaatcataataattgcggcatcagtccactcatgagctaataccccagacaaaatcgcggcaatgatcaaaacaataatcataaagtctttgaattgatcaataaaacgcatgaacatgctttgctttttcttggaagctaaggctttcggaccatattgctctaatctagctttggcatcactagcacttaacccatccttaacggacgtgttaagatctttttcaatgtcggggatcgactcgacataatattttttcgccattttccctctgctatataaaacatagaaacatgcagaagtttgatattttccacataccagaaaaaaatatatttttcctttcctaattttatttactgtcgtcatcattggtattccgatattccatctggggagtaatcgcattgaccaactcctgcagcttaagggcttagccagccccattattttttattttgttaatgccaataaatttaatactgcattgtcatcacgatcattgctatagccacactcataacaaacatattcattgtgcttggtgccatgttttctattgccctgcaaagtgattttgtctgcaccatttttgacatagccgcaactggcacatctttgcgttgacgggtagcttctatcagccaaaattagctctttatcataccaagcacatttataggataatatctgtctaaatttgccaaacaaggacctctgtatgcctttggaagccacatgcgtcatcatcatttgcttgacattcaagtcttcaatgacgatttggtcataattatttgccagctcagtagtaaatttttgcaaaagatcattctgaatattgacagccctgcgataatcacgctgaagcttggttctcacttgcacgtaattattgcttcggccagccaattttccattaacccttcttttcttggccaatattctctgataatgcttgatccgcttgtacagtttctgcagtcttgccggcaaaatattgattctgccctcagtatagctgaagtgcccaacgttgacatcgatggcggtctttttgccagttttaacctttattccagctttttcttcgtaggaaagagcagcgtaataatggcctctttctctaaagatgctggcaattttaacctgtttcatcctcaatgcttcatatgttggaatatcaaaccatgatttaattcctctgggcttatccagtctgagcttgccattaataactttagctcggtcagtcttaaaaccttgacgtggagctttctttgacttgaaatgcggcttgccccagtcgagctgggctttgtcaaaaaagctcttccaagcgttggccaagtccttgactgccaactgcagacaacgagcagacaaggtaaactgccaatcagccttgttattgactaattcatctcgcacccgacactcattaggactaggattattatccttatttaaagtccgtgcttcatacatatcttgccaggtttctaaggctagattccagcagtatctgcggtaatcgcatagacggtcaagttctctttgcatggtcttgtttggttttagctcagctacctgtgttttaatcatttatttcacctccaatgcaaacataagtttagcaaaggatgaaacaaaaacaagcgaacaaaatattaaatttttagcagcagctaatttgtttctatgttttatcttcctgatcaaattaactgcatctttttctatttattgctatcaaatcctatcttttagtcaatcattatttcctcctcaaaaataaaaaagagacttacatgcttgtagcacataagtctcacgaattaagataaatccagaagtatcttacttcggctgttggattcatcgcaagcaattgctgttactcccttatgacaagttaattataagcaaaattttagctatctacaagttttagcgaattgcttttactttttataaaagtcatcaaagacagtaactggcaaatgacgcttgtgtttactcttattccataatttttcaatttgatcagctgttttatctgatacttccttaccttcaaggtaatcatcaatctcttggtaagttacaccgagggcaacttcatctggcaaatctggcttttcttcttcaaggtctgcggttggagccttttcatataaatgcttaggacaacctaattccttaagcaaagccttgccttgacgcttgtccaaacggaacaatggcgtcaaatcagcggcaccatcaccaaacttagtgtaaaagccactaaagttttctgcagcatggtcggtaccaacaacggcacccttattagcaccagcgatggcatattgaactaccattctttgccgcgccttaatattgcctttgttaaagtcagtaatcttttgaccagttgcttctacaaccttcaccatagcatcaactggttccttaatattaacaattaaatcctgatctggcttttgaaaagcgactgcatctgcagcatcttgggcatctgcttgaacgccataaggcaaacgaacagcgataaattgataagaatcatcgccagtttcctcacgcatttcttcaattgccatttgacacaatttaccagtcaaagtggaatcttgaccaccagaaatacctaagacgtatgacttaagaaatggattagcctttaaataatctttcaaaaaatcaattgaacgtctaatttcttttttagggtcaatttctggtaaaacatgttcataagcgataatttctttttgtaattctctcatcgaccaatgcttctttctctaattttacgccgaatgtcttgaatcaaatccatcttggattcgtataagttttgtgataaatccactggatattcctgcggattcaggctacgcttatattcatcccataaaccatcaaggttgtcagcacagaattttttaatttcatcaagactaggttgatcataaactaattttccatctttaaaaatatcatgtaaaagtggaatagcagtgtaatcagttaccaccttattaatatagttatattgtgggtggaacatgaagagcgcgtcaaatttgcgtggatcttcattataccgagatacccagtcaccttcatttttcttagcagtgtttgcgctaatccgccatacttgttttttacctggggtggaaactttgatggcatttgaagaaatcttcaatgtatcccgcatggcgcctaattcatcttccatggcaaccaacttgtaaacagcaccaagggctggttgatcataagcagtgatatacttggtcccaatgccccagacatcaattttagcgccttgcatctttaagttagtaatggtgttttcatcaaggtcatttgaagcaaaaatcttggcatctggatagccagcatcgtctaactccttacgaacttgcttagaaatgtaagccatgtccccagagtcaattcgtacgcccaagaagttaatcttgtcgcccatttcattagccaccttgatagcattaggcacaccactacggacagtatcgtaagtgtcaaccaaaaaaacacaattcttatgtgtttccgcatatgccttaaatgcgtcatattcactgccaaatgcttcaactaaagcatgagcatgagtccctgaaataggaataccaaacaatttaccagcacgaacattactagttgaatcaaagccgccaatataagcagctcgagcaccccaaatggccgcatcggtttcttgcgcacgacgagagccaaactccattagaccatcatctttaacagctaacttgattctagcagctttagttgccaataaagtttggaagttaataatatttaaaatagcagtttcaactaactgacactgggcaagtggaccttcaacttgcaaaattggctcgttagcaaaaaccagctcgccttccttcattgaacgaatagtgagctttaattttagattgcgtaaataatcaataaagtcatcatcgtaaccttcattttctttcaaatattgcaggtcactttcggtaaactttaaattctttaaatagttaatgatgtgttccaaaccagcataaacagcataaccgttgccgaatggttccctgcggtaaaaactttcaaaaacggcattgcgatcagcaatccctttcttgaaataggtatacatcatattaatttcgtataaatcagtgtgtaaagccaacgaatcgtctttggctaattctggataaaacattgcttctctttctgtcattaaaaattaacaatttcgtttttcattatacagccattacagtccattggctattctcaaaactatttttacctcaaaattagatacactttttcaattgagtccagttgatttttaatagaaaaatgctcttccgcataccgcttttctgtattagccatctggcgtaactcttcatgggttttattaacggccagattaatctctttagcaattgaatcaatgtctcccgttttagcaatgaaaccatattcgggtcctggaatcattttatgaatatcacctacatctgtggacaaaatagggattaaattgtctgttgcctctaaaagcacaagtggaaaactctctgaatatgaagttaagacggctagatcaattcgcttatataatccgctcaattggtgttgagtcataaaaccgtgaaaagttacttgtggtgccatgtccaattgccgcgtcaaggccttcaatgcttcaagctgactaccatcacccgcgatatgcagacgaatatgctgatcatctaattttttcacagcttttaagagcaattcttgtcctttaaccttttccgtacgagcaacgttaataatattaaaataggtatgttcatatttagctggaatttcactatcactgtggaaaaagatgccattatagatgacatgtaccttgtttttatccacatgtgcgcgattaattagtagcttggcaaaacgctgagttactacgaaaatacaatcagcttttctcaacgcacgtaaattaagtttagtaaaaatattgccaatgattcccctaccttcaaagtctagataaggatctgaatgtacagtaatacaccaagttgcacgaattcgcttgtgaatcaaagataaaaataagttggcacgcgcaccatgagtatgcacaatatcatagtgcccctcattgataaacttagtcagtctacctaaactgcctaagtcataacgactattagctcctagcacatgtgtagtaatcccagccgctcttgctgcttgtgctactggtccttctgccagcgttaataattcaaaatctttgccttcatttttggcttcagttagcaaattaacaatatgtgataaaccgccgccattttctaaaccagcatttacatgcaaaaccttcatcttagtaaaattattttcccttcttttttgactgtttaactcgcacaacaaactgtggcaaaactaacatccgcttaaatctgctaggattagtaatcaagcgataaaaccactctaaatgcgtcttttgaaaagcttctggtgctcttttaacgatacctgaaaagacatcaaaactgccacccacacccatcatcaaagctggtgtttcgttcttacgtaagattgataatagtttttcttgcttaggaaaacctaatgctgcaaaaaccatatcgggttgtgccttctgaatgcgccgtgccactagttccaaatcttcagtaaagtagccgtcttctgcaccaactagattaatatttgagtattccttagcaattttgctttgtactgcatgaattacttgtggcttagctccaattaagtaaactcggctaccacgatcgctagcaacatccatcagccaagtaaacaaatcatatccagtcacccgctcaggtaacggctgcttaagcattttagctgcttttacaatgccaatcccgtcagcagtaatataatcgggatcattttttagaattttcataaattcaggattctcgtttgccgccatcacaatctccggattagcggtcacaataaaggtcgacaggtgattatttagtcgattaataaattcattttggaattggttaaaagttttattatcaaaatcaacacctaaaatattaactttgctcattttcacacctcatgcgttttcttatctagtttctattctaccattccgacacgcaagtacgagaaacatgttcaagttttatattttattcaaacatgataagattgttttaataaaggagaaaaaatgaaaagagttattacctatggcacctttgacctacttcactacggtcacgtgcgactgcttaaaagagctaaagaattgggcgactatttaatagtaggtttatctaccgatgaatttaatgaattcaaaaaacacaaggaagcctacaatacctaccctgaacgtaaatacattttggaagctatccgttatgtcgaccaagtcatccccgaaaaggattgggatcaaaaaatcaccgatgtacaaaaataccatatcgacacttttgtcatgggcgatgattggaaaggaaaattcgacttccttaagccttattgtgatgtggtttacctgccaagaacgccaggaatttccactactaaaattaaagaagatcttaaataaaaaaatactccaattccattcaatttgaatgagattggagtttttgtttacttagaaaaagtgaattcaaatcgttctgcaacgtaacgtgcgcgggtgtattcgaatggttgcccatctgctagttcagttacctgtcgtctagtaattaacggttcaccttttttagctttaagaagacgcgcatcttgctcgttggcaattgatgcagaaatatgttccgtcactcgtccaatggcaaaaccaccgcgcttttctaaggttttatataagtgcgttgaaacatcttctttagaaaaattctttactaagtagtatggcaccgttacgacttcataacaaattggtgtcttatcagcgtagcgaatccgctccatccgcaaaacgttctcattatcttttagcgcaagacgctctttttcagataaagatggattgccaatctgataagaaattaacttacttgaaggaacttgaccattagccttagtaatctcagtaaaggacataattcctgacattttttcttgaaccttttgactagctacataggttccgctacccaagcgccgttctaaaattccttcatcttctaatgttttaatcgcttggcgtaaagtcattctcgaaacgccaaacttaactgccaattgacgttctgctggaatacgatcccctacttgataaacgtgattctcaatatcacgcttaatctgattgtgaatcttgatatacatcggttcttccatagtcgccacccccaaagtttagtactgctattattataatctaaattggtctagcttgcattaataacactgcttcaattttacagactattttttcttagcggtccacttcactccaagaatataaacatttggacgcttgttatattccacttcaacttgttcattatcattagcaactacactggcactaaattttgcttcatctttaacagctaagttagcctgattaggattcagcacaatattgtggcccttcatattagcttcaccgctcaaagctaaaaagtactcatagttcatatttccagtgaaggtaacacgtgtagcatcacatttcgcctgatcttgaaaatctgcatgagctaaaattacggcattgttcattgtaacttttgcttcatcaactactatcattcgattgatggttgaattttgaatgattgtccgtgtctttttatcaatataaaccccacccaaaaaagtagaattcataatattgctccagcagtcatcacttaaataaaagcaggaatcgctagcagacttaacttttgaattaagcatattcatccaagtttgcccatgcagtaatacataatctacttccgaattattaagatccaactccgcattcgttttggcaaaagtattaatactgccgtgaatctttgaattatttacaattgctgttccttcgccttcaattgccaaagcacaatatttgtccgagaaataatcaatttctgaatcattcatttccaaacggaaattggcatggtcatacatggaaactgaaccgttaacaattttggttgaataaagttccaacgtgatcttaccattaaccgcgatagctgctgtatcagttcccgtgcccttaataaagcaattacgcaaagttaaatagccatcaacgcctactggtacagataggctattatgttcggtagttgtatcaatgcataaattttctaaagttacataacgactatcttctgaaacactaatatagccataaatagtcgtgtcttctggcaaagagcctgttcccttaattgtgatatctgttagtgtgatgccctgcggcaaataataatatccggggcccagcatcaacacatcatcggcacgcaaatcctttaaaacctcgtgccaactgactgaactgctagatccccctactctaattatcctagccatccattatcctttcatctcgtaaaaaccgattactattgtactaattttctttaatttatgttgtatttttgctcatcaaaaaagctaggttcgattcctagcttcttatactatttcattttaacattccagtaataagccacattaccataaggagaaagttggaaacctttcactctcttattcaataagtatgacgtaccttgttggaatagtggtgccgcaaaggcatccttttgaattaattgtttttcagcgttaactaaggcattcaatctcttctgcggatcagtggcataagttgaacgagccaagtcaatttgcttccagaaattggcgttgtgataatctggcgctaaattaaacaaaccaccaactgtcaagaaatcaattggatcttcataacttggctaccaagttccgtaaacaaagtcgtaattgtgattagttgtgttagatagccgtgacttcaaaggaattgaccgtacccgtagagttagaccaggtaaatttttcatcaaattgctttgaataaattcacccacacgcttagcatcgtcaatatctgaagtaagcaattctaaggttagcttcttcttacccaattgcttcaaaccaagttgccattcctttttagcttccttggcattataggtaaccaagtcgccagcatccttgcggtaatcgttgccagttgcctgatcggtaataaagtttgcggcaacaattccatttgacaccttgccttgatgcaaaactgtcttgactaactgttgcttattaattgcccggctaatggcccgacgaatatgaacattgcctgtactcttacgcttcaagttgaaagaaagataaccattagttggcgtaactttggtatgatagctagaattattttgatactgcttaacaaaatcagaagtcaatgtcgtgtaatcaagttcaccacttctgaacaagttaaccccagttgaaggagtttgaaccacttgtacgttaactttattcaaatcaacaattttcttgttccagtaagttggatttttcttgtaagtccacttcaaatttgaacctgtccaaccagatacggtaaatggaccattgtaaactagattcttactgctagtcccatacttagagcctaactttttaaccaatttagaattctgaggatagaattgtgcaccctctaagatttgtggcaaatatggaattggattagctaatgtaacttgcaccttatacttgccgagtgctttgattcccaatgaatttaccggtgctttaccttgagaaattgcctcaccgtttttgataatggcataagaatcggcatctaaagatgaattttttgggtcaacggttctgcgccaagccgttacataatccagggcagtaactggatcaccgttagaccacttagcattattgcgtaaggtaaaagtatagaccttctggtctttagaacgttcaacttttgtcgcaccagctaattctggctgatttttcttattaaaacggtaaagaccttccatggaattctgcaaaacttctgaactagtcgtatctccatacttgctcgaatctaaagttgaaatttcatttgtgacagaggtattcattgtcttagtcggtgcagcattactgtcattgttagagcaagctgccagcaccaatgcggcagctgctgtcatcactcctgaaaaaatccattttttacgtctcaatcttctcaccctttacttactttttgtttaatacttacattttacaagtatatctaatacggaagaaatttcaaatactttttccgtataatagctataatcaatacgtatacaaaaatggcaaaaaaaaagaaacgtcacataggacgtttcttttttcgggttgggtgttcttttagaactattgggttagctggattcgaaccagcgcatgatggtaccaaaaaccattgccttaccacttggctataacccaataccagctgaactttttacttgtcgttcaacaatggaggagggtggattcgaaccgccgaactcagagagagcggttttacagaccgccgcgtttagccacttcgctactcctccgttagctgacttaattataataacgaaaatccaaatcaaatgcaagacttttttgaaacttttttcaaaaaaaagaagaagccatgacgacctcttctcaaaatttaaaaattgatttatatctaaacagttaattttaagcctaatgccttttgtgctacttgatttaccagactccattgcttgtcataagttggtgaaaagaagaaatctgcttctgctaaatcttccagtgtcaacttatttctaatagctaagctcaaaacattggcttggccactaatgtcatatgatgaaagtacgctaccgcctaagatttggtggctgtcttcattataaacaacagcaatatagcaagtaggattatctttttcaggaatatagtctggacgaagataactctttaagactgtttcttttgcattaattcctgctcgcttggcattcttttcactgagtcctgttgttactgcatgtaaatcaaaggcttcaagcaattgtgcaccaactaagcccttaaagacacgttctggcttgtcttcaaataagtgctcaacaacatattgagcctcatgccgtgcagcaatggcagatggcatcggtactcttctgttagctggaatgctaaatgggaagattgcatccccaattgcatagacatcctttacattggttctaaagtaattgtctaccttaatgtagccattgtcataaagatcgatcgtgtttttcaaccaatcagtatttggcttaataccaactgtaataatgacacaatcagcagtaatatcacccttatcagtctgaactgcattgacctttccattgccaacaaagccagtaactttagtgttcatagccaggttaacaccatgatcagtcaattctttttcaaataagctagtataagtatcattcaaataattttctagtggtttttgcccaccgtcaattaaagtaacattcttgcctgctttagcgaaaacctcggcagctgcaattccgttaccagcaccaataactgcaacatttttaatagcttcatcttgagcagctgcattgatctctgtagcgcaatcatagcctctcatcaacataatatttttcaggtctgctccaggaagaggcaaacttgcggggttaacacctgaagaaataattagcttatcataactaacttctttggttgtaccatcttttacgtttttgacagtaaccgtctttttagctggatcaagagctgttactgctgtgttattaacaactttaccaccccgttcaactagatcttcaggagtaaagtttctaacgttgtcttggcctgtagtttttccttcaaggaatagcttcattccgcaagacataaaggaaacgaagtcgcctgcttcataaatcgtaacgtctacatcatcataacgatctaaaatttcataagctgcctcttggccgccgtgggatgcacctacaataatgattttcttttttgacatagcctgacctcctaataatgcagcaataattgtcgtttttaagtaatagcagttattgtaactggttacattatttatcttttaataagatatttcaattaatttgcttttgattagtgcgaagcagcaatatattttttatataaaaaagagcactactgatagtagtactctagagggaaattttccaaaattatcttatttagctaattctgctgatagatttcgttcactaatttagtgatttcattacgattaagaacttcatcatacatatccattgtttcctggattgtattttctaaattagtaccatgatttttggcatagccaataaacttttttgcatctactattttagcttctttaatcgctttttctgcagctcttttagcaacttcattcatctcatattctggcttattcatgtcttcgacccattttccgctattcacgtagtagtcgatatccttctgcaggctgatatccctgcgtagtacatcatccgtttttctagatcatttttacgtgttgtttgcatctcaatatcatacactcgactttgatcatcttgtgcccagatatctaagcgaatgtttttggattctagtccaatgttgccgtcatactgggtaatgacattaacttttgtcaattttaattcaggaaacatccgacgtagcagttccagacaattctttttattgctcataacatgaccgaataccaagtcgttagtaattcgaggatatcgattaattcttctcctcatattttacctcttttctttttcttaagtaggaaaattaccctccactatttattactcaaaaaagtgcaaatttttcagaaatttaaaaatttagacacgaaaaaagccgatgcaaatgcatcgactctttcagttaaattattctactttttaatagaagtttacagccttgatgtaacgcttgttgttgtttctgcagccttcaattctgtagtacttcttaccgttcttaaatctcatttgaccaccgtaagtagttacagtttgacctctgtacatcttaccagtacctggagtacgacggtatgatgaccaataaatgtaggcattgtgcttaaaagtacgttggttaccagtaatgttggttacacgaacgtattcgtccttgttagccaccttgtagtaagtcttaccgttgatagttacaacagttggaacgatttcaatgtcgttgtaagcgtagtacatgtgacctaagtagttaccgttcttgtcataagctcttgaatcaaccattactggcaaagtcttggtgttagtgtcaccagctggcttaacaagtgatgaagtcttaacccaaatgttgcttgagttagcatctgacttagacttagttgaaacttgtgagtatgatacattgttaagggttctagtttgatcagcaacgtaaacagtgtcaccatctttgaaagtagttgaagctggtcttacattaatgccataaatgtggtaagttgcgattgagcttgcgccattagcatatagagcttgtttgtggcttgaagtaattaaaacagtgtatgttgcagtagtcttcttaccagttaaaccagtagcagttaaagttacattatagtaacgtcctgcttctgaagtattaacaggatttgaagttgcttctagtgaagcagctgtattattattgctgttttgtacagctgaaataataactggctcaccattactatttacaaaattagttggattaaattgtgaaccaacagctacttggaatatttgaccattaacactccccttgctttgaccattcaatgaccaattgatcactggattttgagtagtatctgtagttgaacttgaacctgaaactacaactgggatttgaacagtagctgtttgcgtagaagtagaacctgtaccagttaaagtaagattgaaatcactagttggtaccgcagtaatattcttgttatctttacacctgcattcttaagaatagcagcaacttcactatctttaaggttaactttttctccactggcattattcgtactaaagaaaactaatcctaaatcattaattgccttagtaacactagctacagtatctttagccttaatagaaatagtagttggtacaacattagctgttttatcggtagtacttgcagcatcaattacttgattgccatatgtaaagtatgatctatctgttggctttgctgttgttgctgtagtagtacttgtagtaccagtagtgttagttactgtacctaaactaatagcagcgttaactggaacagctgaagctgctacaggagcaactgccaacaaagcggcagcagccatacttacaattcttgtattctttctcataattatgtggcctttcctttctgaaacagaaattcatcctaagcagtaagttatatcttcttctgcttgtgaaataattatagcatgttacgaacccgattactaaaaacaggatcgactcgtgtgtgtgattttaagaatacctcctaaaatcaccagtaataccctaccctttatttgttaaactgtagttaccggacttttacaattaagattcaaaacattacatttttgtgaagttttaaacaagttattgatttatgacagaacttatgtgtgttaagaaaaggtaattttaacacttgttcgcttaaaaaaattaaagctcttagattttttgattagaaataattgcttcatgttctttaatatgctcaactcgccctgcatcccccgcaataagtaacaaatataatgcctcaatcattgtcatacttgccacgcgtgagaaataatactgcgattgcatcaccgtctgccgcactgctgtctttaaatgcacatcagctaatagcgcaatcggtgaatcatcgcgattggtgatcgcaatcaccggcatccctttttgtttggctaccttaatttgcttaatgattcccgctgcttcacctgaattcgaaatcaccaacaagcaatcctttttactcaggttcattgtctgcgcaattgccgtttcaatcgtgccacctgaatcaattgccaacaagccaatctgattaaacttatacactgcatcagcggccaccggataagtatcgccctccgcactaacctgcacaattctgctttcagtcaaaaaatgcagcacctgatctaatttggcttcagtcacattctccaaagtcgccttaatctcggcgactttatttttttcaatcaattccaaattagcactagcatcatcacgtgacatattttgaagtgacacactttcagttgcattctgagctagttgaatttttaaatcatgaaaacctgtcaaatctaaattatgacaaaaacgcgtcaccgaagcatcactcacctcagcttcagttgctaattttgaaattgtataatttaccacctgttcgggctgttttaagatcacttgagcaatcttctgatcactggctgacattgtcgctaatttactatagattgtatcgataattttagtcattattctcaccttttctgtgccaaaattatatcatcaatgtaattaattttcacaattttatttttaaagaaaataaatttatattttgattgacgaaaatcatttaccaaggtagtatgtatttgtaaataattttcacaggagaaaataaaatgaaaattaattcgataagtgacctcgctttaagtaaaatcaagccgaaaatgactatttctcttggcggcggaagcaatgtatttaagttatctcaagcgattgcacagcataacttagacatcacattatattctccatccgaacttactcgctttaggtgcaaagaactcggattagagcttcttccatctactgcagcgactaagatcgatattgcttttgatggttgtgacagcattgataagaattttaacgttctaaaaagtttgggtggaattcatctttttgaaaaacaggcagcacaaattgccaaacagtttatcctactcttacccagtcaaaggatacaaccgattctgaatcctaaaattccactttgtcttgaagtggcaccgccttgtgttaatcaagtacagaagtatttaagcagtttacatttaactagtaagattcgacaagatagttcagtagctgcatttgcccgtacgcctttgggcaactacttaatcgatgtttttaacgaagattggcacaatatcactgaacttaatcgtcaactttgtttacaaaatggcgtagttagttcttcactatttgaaaacttaactacttcattaattactgaaaaagacggagaaattattgaacttaagagaggtaataatcatgaaaacatttaattggggaattattggtactggctggattgcacatgatatggctgatgctttgaacaaagtcaacggcgaaatttatgttgccgcaaatccaaatgaagaagcactccgtgcctttgtccaagaaaaacatgtacagcatgctttcactaatcctgatgaaatgattaaggatcctagcattgatatcatctatattgctaccccacacactttccactacgactacatcaaaaaggccctcaatgctggcaagcacgtcttttgcgaaaaggcaattaccgtcaatgcacagcaatttgatgaagtggctcaattagctaaagagaaacacctaatcttaatggaaggttttactctttatcacatgccaatctaccaaaagatgcaagatatgattaagaccggaaaatttggcgaaattaaaatgatccaaattaattttggctcactcaaggactatgatccgcagaatcgcttctttaataaggagctcgctggtggtgcattgctggatatcggcggctacgcaactgcttttgccattagtttcatggatgaatatcctgaaagtatcaataccacggtaaaattctttgaaactggtgttgacgaagaaagcggcattattttaaaaaattcgaaaggccaaatggcagtgatgtcattatcgatgcgggccaagcagcctaagcgcggactggtttcgggcaccaaaggttatttcgaaatcaatcaatatcctcgcggcactgaagctgatattacttacacccagagtgctcatgaggaaagctatgataaggttactgccggggatgctgatcaggcgcttgaatatgaagtcactgattttcaaaagtatattgaacaaggccatgacgaaggcgaattggaaaaatcgcggatgatcgctcacattttaaccagcattagaactgcctggggcatgacttatccatttgataacgaggaataattagttggatttcaaaagggatcgatacataacatcggtcccttttatttgcacttattgcttattttctgcgacatatttttctagtcgtttcaagccttctttgatctgatccatcgacgttgcgtaagacaaacgaatatatcctgctccacctttagcaaaaaatgagcccgcaattacagcaacatgcctcttttcagccaaatcataaataaacttggtatcatcttgttccaagcctgctggaattttggcaaaaatgtagaaggcacctttaggcttaacgcattcaaagcctaacttggttaatccttcataaagcacatcacgccgcttttggaattctttcttcattggttccgcatcgttcattccattgcctagtgcttcttcagctgcatcctgcattggcgttggttccgtcgttgtgattgcttggtgaatcttagccagttgatccaaaatcggcttaggcgcagctaccacaccgattctatagccagtcattgcccaagcttttgacacgccattcattaaaacaacttgatcatgtaaagtcttttccatcgaagcatgtggctgatcataattgagctcactataaatttcatcacaaagaacaaaaaccggcttatctcgaacaacatctgctaaggcatcaagttcatcttgtgaatacatcacacctgttggattggtaggataattcatgacaagcgccttaacgcgatcaccatacttgtccaatgctgcttgcaatttatccggcgttaatttgaagtcatcgtcagaagtgtcgatttgttcaaccgttgcacccatggatagggcatccccaatataaagcggaaaaattggtgttggcaccaaaacaacgtcgcctggattaagcgccgcagtcaaaaagtcgtagatcgactccgttaccccattggtgatcaaaatttcgcttgggtcgtatttttgtccatatttttcagctaaaaaatcggctgccgccttgcgcaaacctggagtcccgttagatggcgcatagtgtgaatggttattagcaatgctggcttcagccgcttttttaatatgctctggcgtgttaaagtcaggctcaccaatcgtgaatttgacgatgtccgaaatcttgttggtgtaagctgcaaaggccaaaatctgccctggcttttgttcaaccaagccttttttcatatgttttgttaagtcgaccatagtttttcctccttatatcgaactaaatcaattcaaatataggagtctttttaatctttgtcaaaggaaatattaattttgatatctaaagtgcacattaaatccaataattaacaaagcataaatactataaatagccgtaacagtcggatacattgcctgatactttatcagcaaaagaataattaaaactatcgccaaaacaatcgttaatattctaaaacgttgaaaatatgacaaaatcggtaaagccactgtcaaaactatatcagttattaagatagtaaaatccaccggatatgatttgatataaaaaaactgaaatattggcaatgcttctaacagtaagaagatataactaataatcccacatattaaaagcaactgattaagtatctttttatagtctttcattaaatcaagaacttctcttttttcatgtaccagtgcttaaccagagtggtcaatgcaatgtacaaggtcaaaagtacaagaactacgagaacataatattctgggatcggaccgaatttcattaccttagccaagcttggaatgtaaggcattgcagtaccgatcaatcctgcaccgatcgtagcgagcattactacgcctgaagagtgctgttgtaagaagggaattgctggatcacgcaatgcttggataaccatttcctgtgtccagagtgattcgatgaaccagccactccagaagatggccataaagacagccttttgccctggagtagcagccacataacttgtgcccacagtacttggacaaatccagaagtaaagcaaggcaaacgtaatgatatcaaagattgaagatgtcggaccaaagaagaacatgaacttaggcaacttctttgtctcccacttacgtggtacttccaagtatttttcaccaactctatcaaatggaagtgacaaacaagatgtcccgtagatcaagtctagaatcaacaattgcattggcagcattggcaagaatggcaagaatgatgatgccactaagattgacaaaatattaccaaagttagatgacaaggtaatcttgatatatttcatcgtgtttgcaaagatctgacgcccaattcttacaccatgttccaaagtacgtaaactcttgtgcagcaagataatgtccgcactcttttttgcaatatcaacagccgtatcaactgagattgctacatcggccttcttcatggctggcgtatcgttgataccgtctcccatgtaagcaaccgtgtgaccattttccttcaaaatctgaataattctagcctttgactctggtgaaagctttacaaagaggctacattcttcaaccatctttttaacttcatcgtcgctcttaccagcaaaatctttttcactataaatgtacttggtgttcaagcctactcttgaagcaacactcttagttacagcagcgttatcaccagtcaaaatcttaacggtaatatcgtcttgctttaacttcttaagcacgtccttaacatcatccttaggtggatcaaggaaggccaagaagccagttaagatcaaatctttttcatcgctaacattgaattcaccggcttgagcaggattgttcttgtaagctaacaaaacaactctcaaaccatctttgttcaaatcttcaatgtgctttaaaactttttctttgtaatcatcagttaaatcgttgatgtgactgccaacttgcacacgattgcagcaagcaagcatttcttcggcagcacccttagttaccaggatacgaccatcgccgtggcgcttgaccacgacactcatgcgacggcgcttgaagtcgaatggaatttcatcaaccttagtgtagtcgtgtttaatttcattaacatctagctcatcgctagcggcatcgatgatggcttggtccatcaaatcgtgcatccccgtttggaagtacgagttcaagtaagccaagcgcaaaacctgtggattttccttcatatccaagttgtagtgccgttccaatacaaccttgttttgggtcaaagtaccggttttatcagtacaaagcacgtcggcggcaccgaagttttggatggagttcatctttttaacgatggtgccgtgcttcgacatttctagcgaacccttaaccaaattactagtaacaataactggcaacatttctggagttaaaccaacggcagtagcgatggcaaacaacaaggcgttgagccagttacctttagttaaaccgttgatgaccaaaactaaaggtgcaatgatcgcggtcattgttaacaataatttagaaatgttcttgataccaacatcgaaattagtttccttaacgtcgttgtttgaaatatccttagccaaacgaccaaagacagtttgttcaccggtggctaaaacaacgccaacacctgaacctgacacaatagttgttccttgatagattacatcaggatagtccaaatattgatccatgtctttttgatcgggcctcttagtcgcaatcttttccacaggcgttgattcaccgttcaaagaacttgatgaacagaacaagtctttagttttgagcaatctaatatctgctggcaccatgtccccagcgtggatattaataatatcgccgacaactacttgcttggtagaaatttcttcatccttttgattgcgacgaatattggtagttacagacaccatatttaagagggcttcaactgcgtcattagttttcacattctggataaaggatgttaatccagaaataatgatcatcgcaatcataatgatcacagtactcaggtccttttgatctgccggcacgaagacgtagtcggtaaacagcgacaccgtcgctagcagcaacaggaccattgtaaaaggagtgaagaatgattcaatgaagaaatgcaatttcgtgttgtgcttcttggtagcaacttcgttaagaccattcttctccaaacgctctttagcttccgccgaagacagaccgtctagcgaactatgtagcgtctttaacgcttcttcgggagtttgcctagcgatctgcttaacaaactctgtatcggctgtcttcttattaatcagcaacttgttttttgccatgttaatcacactttctgattaaacacgcaaacaaactaaaaaggagccaataccaattagtattaactccttatctaagcgatgtttcctcgtcgttcagttttgacactacgtgacgtaagcacaggctagctatctggatctcgccttatctcgacaagaactattttactcgttggcatctctggatgtttccgggcgatagcttgtgttcacgtaggagcctcacctaacagtttatttgctttttcaattttcatttttattatatgcatattatttgacaatgcaattatctttactaaatcgttagaaattgtaaaagaatttaagaatgataaaaaacacgtgtttgcaatgaacacgtgtttttttataatttaattttgatatactattctatagacatggatatgttgcaactatttgtgtttagtagttttagcataactaaccacccctcacacattttgaaattacggcggtgagagttatgcataaacggatagtttggaggtttagtgctccgtggtagcttgggctattgcaatcagcatcgttctaggtgctttaggcaatttagctatcaatttggctatagcctatgcgataacaaaaaaagctaatcgcaaggattagctaaaccaacagttatctgaaactacgatcgaagtcaacggattgcggccgtgggcttcttttcatatacagattataacatgaattatccgaaacgaataaaaaagatcaggctcactgcctgaccttgctattgggttagctggattcgaaccagcgcatgatggtaccaaaaaccattgccttaccacttggctataacccaatcttcaaaccttttacttgattggttctatttgaatgacctctcgatcacccaacagatattagtataggggaatgaagaaaaaatatcaaggaaaaattcaaaaaaattttgattttttcacatttgctcgaaggatactgaatctttcttttatgaattataaaattaatttgtttttttacgattataacttttgtgacttcttaaccttattcattaattcaaagtcgttggtaaaaattccagctacaccaagtttaaagtacctttttgctatgcttactttatctactgtccaaattctttgcgtaactttgctaggtaaataccaatgcggatggatcgctgcaaaatgattcttagccgcaaactgttcaggaaacggcaccggccatttgtttaaaaagcaatattgttggtggggatcaattcgctggcaattttttaaggtttgataattgaaggaagagaaaataatgggatgcacaaaatgatattcttgtgctaacgccaaaacgatggcttcaatcccctcatcatgaatcttgttagtcttaaattccaagttaacatacaaatcctgtccctgaagaatttcaaataattcacttaacatcggtaccggttcaccgttagctaaacgaaatcgcctgatttcacttaaggtatagtccttaatataacctgtcccattagtagttctatctaacgtttcatcatgcattactaccggcactttatctttagttaagtgcacatcaaattcgacaccttcagcgccatgcgttgctgcatatttaaatccttgcaaagaattttccgcaaatttgaccggtaagccccggtgagcaaaaataattgtctgagtcattttttcacctacaaaaaaatgccgctctcgcggcatctgctctattttaatctaagacgattgcaccttgagttgccaaagtatcacgaactagattcttaacatctcttctaactaccataccatcggtgttctcaacgtattcaagatattgagctgacttaatatgtgcatcataagccttgtcatcaaagtaaacttcgacaaaataccattcgttttcgttcttcttattgactccagacatcataatttccatgcctggttcagcagccatgctagtcgtcatttctttcttaacttcatgcgcaaacttttctgcatcttctggtttaacttcaactttaactaagcgcattacaaaatgatctgcgttatcattcaaagcatcatgagcctttgtggtaataacttcgggctttaattcgattacttctttgtctgtggaaatcttgtcgatggtttctgcaaaatcatcagcatgtgctgctgcaatgtgcaaatcttctgccaagctattccggaacaattcgatttcgtaattgtcttcaccatgagcatcgtcatgtgcgcttccaattaacaaagttccttcttcagctggaattgagttgtgcatgttattttcaacttcacggatatattcaccgcgatcgttttccttgatatttaatttagtaattctaaaaattggtgtttcatccatttttcttgcctcgtactataatctttccacacctatcattataaactaatgcagaaaaataaaagcccctattcaccagttatttgatcaattttaaccgctttagctggccattcagtccgtacatattccaatgtactgccttcattgctagttaactgcacaaaagaacaattgggcagacctaaaaattcacgatggttagttttttcattaatgtattgcgacaaactatcgccatgaccaacaactaaaatattatcgccatcttgtgcatcccgcatgatcaagttaatcccgcgctccattcgctcaactacctcatgattatcttccacgcgaaatttgcccaaacgatgcagcggccaaagtagcacattgcgtgcctcaaaagcgccatagcttttctcttttaattcctttaatcgaacatactccatctcaggcccagcaataatctctaaagtatcacttgccctttcttggggtgagcaatatgctctagcaaaattaattccctgatcttgaaaataatcccgcacggcttccgcctgcttaatgcctaatggtgttagcgctgaatcacagcttccctgcatgcggtgtcctttattaaaccaagtttgaccatgtctgactaaatataaattaattgccatttcgtcttactttaaaccctctgctggccacacgtatgaatcaaaatggatctttttaccatcaactgttagcttcacgattgaagcattgccaaaaccgccaaagttcttattctcggtagcatcgcgcacaaacttagctaaaatatcaccatgtcctacaactaaagcagtttgaccatcctctaagccgcttaaaatctcgactaccgcacggtgcattctagcaacaacgtcttcgtctttttccatagttgggtctacgttaggattattataattccaaggcaataagaactcatcacgaccttcaaaaatgccataacatttttctcgcaggtcttttaaacgcgtataaggcatttgatgatcagtaataatttccaaagtatcgcaagcacgctcttgggttgatgaaaaagctttgtcaaaatgaataccctgctttttaaaataatcacgggccatttcaacctggcggatgcctctttcattcaatggtgaatcacaacgtccctgaactttatggtaatagttaaaataagtttgtccatggcggactaaatataaagtttttgtcatattttcctcgctaaatcgttttttcctttatcttatcaaaaaagcacgcgtcgtgcgtgctttcatattttttcgttaaattttgaagttcttgttgtattcactcgaatttacaacaaaacttggcacactaatgaagtgcattgagtaaatattgccagtcttggaaatgctaaagccataataattgtagtccccatcatgacgtgagccctgtgtattaaataaatcaccggcatgttcccattcgcggtaaaggctcttatcattacgctgattttccccagctcctgcaaagccaaagatcatttgcttcaagccaaagtaaatatttcgcttcatttcagccatagacataatcttcttattagtagaaaaaccagccatatcttcgacataattatcgttcccggatttaaaattgaagtgcaacactaattgttaaacaaaaaggccatgaagacctaaacttgaagtgaccaaaaatcaagaaaggaagatcttcatgaccaactcaaattctagcatttccaagcattatcatcaattgaacagcgaacaacgtggacaaattcaagctctgcttgattctggcataacctcctgcactgctatcgctcaagaagtaggctgtcataaatcaactatcagccgtgaaattagacgaggcagtgtcctgcaaagagacagcagctatgtcttgtatgagcactattacgctgatactgcacaaatttatcatgaaaagcgccgcagaaactgctataagtgtaatccactgcaacactatgccgtctttttcagaatgctaagcagacgctttaaagccaaatttgatgccaccagcattgatgaattcgttggtgaatttcacaggattatgccaaattatccatgtcctagcacgcccactgtctatcgttatattgatcaaggattgctggatataagcaatatcgacctgccaatgaagcttaaaagacgccgaaacaaacgccatcatagtcatggtggccatgctccgcataaaaagaatcttggcaattcgattgaacagcggcctaaagaagttgaaaacagaaaagtttccctgcactgggaaggcgatttggttaaaggcgtcagacgtaaaaatcaacctgccttaatgacactgactgaaagaaccactcgttttgaggttgttatcaaaattcctgactatcgggccagtacttgtcaaagactgcttcaaaaggagattgacagacatcctaattggtttaaatcaattacgtttgacaatggttctgagtttgcggatatgaccaaaatcaaaggatgtcagatctactttgctcatccatattctccttgggaaagaggcacaaatgagaactgcaatggacttctgcgtcaattcttccctaagggcaaaagcatgaaagataagtcagctgcttatgttcaacaggcaactgatgccattaaccgcaaacatcgtcgaatcctccaatatcacacagcagaagaactcttcaagcaatacgttccttcatagcctaactgttgcacttaatttgacaattcaggacataattatcgtttaattctaagccatgtttcttgcaagcccgtacaattccggcaacatagtgatcgccatctttgatactcttgccattttgctcgtattcttgcgcaattgaattagctaaggactctactccagaactataaacccacggcttcaaacctaattgactacgagcactattaattaggcacaaagagaattctgccagttctttttgctcactagcagaaagatcggcaagattgatcattttttgatcggctttgctttcacctgagctaacacgtgaaaagtcgttttgctccattcctttcatgcaagcctgaataaaactagcacttggcttccccttatatgcttgcaataaactagctttcgtatagccactcggcatcttcattgtagctgttacataattctgcgttgcagcagtctttttaacgagtttggcatttttagctaataaccattgagagttatttccaatcttataagccaaatattttttcttgcccagctttaaatactttttagcagaataagaatactctcttttagctacagcataatacttagacttcttgcccttatttgtataaagtctaactttcttagttcctttaacctgaacttttcccttaactgctgcttgaaccgtttgtggtgtcgtttcgtgtattacactagccgtccccatcaggcaaacactagtcaacaaagtcacaattaatttttgcttcatagctgttccactttctgtatgttttgattattaatatttgttatttaaattatatcgtatttatttaattaaaaaaatcaaaaagagacacactatcattttgacagcatgcctcctttaagttagtttgattttatttagttttgaaaagaggtttatttttagtaccagccgtttgcttgccagaatgccttagcagcagtccatgagccataacgacctttgacatagttatcagctactcgctcttggttagctgctgaatagtcaccattcaagtatgaagctgaaagttggtatttaccaacgtattgaccatttgaagcaccgtatgagccaccagattctctaccggcaatccattccttagcactagcttctgaaccacttacagttgaagtagtagtttgagtgttggtgttatttgctgcagtagtagttgctgcagaattagtattttcagtttgagtttggtgttgtactggagcttgggttacagcagcttgagtgtggtagccgcgagttacatacttagcacgaacccattggttcttgcctaagtcataccacttgtgacctttggcatcgtaagcagtcttaattactttccatgaggtgttgcttgccaaagtttggccagtagcctctggattcttgtagctgttgtaaacagtgattgcgttgtctgaaacgttcttaactgttacaacagctgtatcgttttctacaatagcagcttgagcagtattagtgttgttattagctgctactaaacctgtaactgataaagcagttactgcaattgacttaactaagatagatttaattttcaaaaaaattctctccttaaaattttaaaagtcataagtaacgaattttcaccttattcgtccgtcccattcaattgacacagcatatactaccttgcttaaattgcagaactataacaggaatatcacctgcagattaagaaactattgcaaagtatgtcaaaattgtaacaattgtaatatttatgtaaatttattcagatgatacaaaaccgcatcagatcgccatttaactcgatttttaatttttatttgctatgtgcaaaagcttgttcgcatttaatatattgaaacacttttgcaaaacgaaaaaagaaagagtttcctctttcttttttaattctcacaaattttttattaatttattccattattctgccttatcctcttctataagttgacgtttattaagtgccgcaataaatggcaggtaaatcaaaatgtctaagataatattgattacttgcaaaattgagcccgcaatactgcctgttgccaaaaaaactgaaataattggcggcattgtccaaggaattacagtcccattacataatagaactaagcctaggttcattgcacaataagtggtaatcgcatttaacattggcgcaatcataaatggaataattaacaacaagttcattacaactggcagaccaaacatagttggttcattaatattgaacaagccaggtacgatggtcagtggtgctaaaactttattttgtttacttgcgcgcttgcgccatactaaatatccaatgcaaagcactaacccaatagtggcacctccatcacccatgtaaacaaagttatcgataaatggttgcgtaacgatatgaccaccatgagctaaatctaagttacctgcttgattcaatacacggttagcatcggtttgcatcaaccagattggttgcatagcagtattaactacgttaccaacatgaataccaacgaactagaacaagctcaataaaataattgaaactaatgtaccaattaaggtatcgcctaatgcacctagtggcttagccaaaatattcatgattacatcgtgaatattgccccatccaatccaagcaaaaagccagtaaacacagccagcaatagcaattacagcggcacctggaattaaagctgaaaagctcttagctacagcaggtggcacagtagctggcattttaatttggatattatgattaataaaccattggaaaatccatgcacttaggagaccaaagataatagctacaaataatcctctactacctaagtaagtgtaagggaagccttcaactggaactttatctccactcataatacttggcgtcaaaatgaagaatacagctgcagaaacaattccggcagaaacaccatctgtcttatattgattagcataactccaagcaattccaaaagctgcaattaagaccatgatcccaaaggagccattagtaatcttggctaaaatctgtgccaggcttataccatgaacagcagtttttgatagccaatcagaccaaccggcaactggaaatgaattaatgatcctacaataattaacggtatagccatggcgataccgtcacgaacagcaattaaaggtttaaaactgcctattttagcggctacaggcataatgtgtttgttaacaaacgcattcaaacctccgctcgatttactattagccataataattccctcttcaatctaaaaatgatctcgtgtttctttggtatatacctttcgcaatataacaatatcctgaaagcgattttattaccactattttaaaagataattttttgcttatatttttaaccaaagtttgattaacaaaatattgcagttatggctgtaagtgctatagtttacatgtaatcataaaaaaagcgaggaaataaaattatggctaaatacgaagtaaagttaagcgaagaagatttacaaatgatcaaagattgtcattcaaagaacccttcaatcatgaaggctatgaacgaagccaagaaagtcgaagattaagcaaattttgatctctaaatcgaaaaaaggcgtccgcaagggatgccttttttattggttttcaaatcttgtaccgtggggatgcttccagttataaacacggactattttacccatgccatctagcactacaacatttccatcattatgtagataaatcaatggatcagaatgtgaaccaccgtcagtaaaaattcttgctggctcacctgggtattgcactgttctaactatacaatcatcaattgatagccgcctcatttgtcgaccatcatcatattttccttctaaagcagctgttggcgtatgaccagtcacaattgttttgcccgttttgttatgagccatcattttcaataaggaatcggaataccaatacttatctcgtgcccaaatacggtaaaaatcatagtcaaatttcaagccatactctatctcagagtaagtttccggatcattatactgttcatctggccgcacacccgcatgaacaaaaatcaagtgtggcgtttcatacataataggacagccttttagaaagcgataatactcactatcacgcaactcatcaggcaaaactgtactgccaaacagactaactaggctcttgccaccaccgttataaacccaaatgccatcttgatgttcctgcttctccgcaaaattgagtaacatttgctcatgattacccagtagtacgattgctccttcgcttttttgctcaattaaataatccaatacttccttcacatgctcgcggccatcaacatagtcaccgcccgcaactaattgtgcttctggaaaatctgctgttgcctgcttgattaagtctaaggtttctaagttgccatgaatatcagaaatgaagatatagttctccttcactcgatcatccaacagcgttcgattgataatttttttcatttcatactaccccatgtgctaaattaaactaacatttttttcttaattatagcagatgtacactggttctttttctatgcaatcctaaaattaacctccggcaaaaaaaaggctacaatagatatgaaaagaagtgattgcaatgtttaatgaagaaaatgcaattgatgccaaggacttacacgttgattctttcaaatatcaatcaactgaagacatgccatctgatgcttattctagctgggaagaaaaacacccaaacgccagggtattcaagcttgaatttcgcaacatcggcgaaagcaatgaatggcaggaaatgatcattatctacactgaataaataaaaagtggaagaactccaagcctagtgtgtttcttccacctttttacttattttgattttctttttccttcaatttgtgcagaatccgttcattttctttagtacgtttttcaactgctgcatcgatgatcgaatcaaaccaatgattatcagaatcatcgcttgtttgatccttcttttgaggaccttcattttttacacgtttgtcagtttcttcattaataatggaatccagccaatcaaaattatctggatcatggctcttatcagtcatttatttttcctccatttttgatttaaattaatttatttactattctttttgactataattgagttaacaagatgaaacaagaaagaagtgttcgaaatgaaaattacattcactgacaaggcgcttgactacttaaaaagacgcgaaatcttgaataaaattctaattttaatcgccgacgatggtggtggtaaatattctatcaaaggcggcggttgtgcaattggcagtcacttttccattatttatgtagacaaagttgatcctgattatccaatcaagcttgaaaacgaccaaggaatcaatatttacacttctaaatacgacaccacaatgatgggaccaaatttagtggttgactacgccaatgcatccctcaacttaaagagtgacgaaggattgcttgatggcggcgttgatatcggcaatggcgccgagttaattaaagctcaaaagaatgtaaaaatgaccggcgttgaatggcgttgctagattaagatgatcagaaaagacagtagtttgaaatcaactactgtcttttttctatagaaattgaccactattaggatcgaatccagtacgatctgccgcggtaatctttctaattaccttacatggattccccgctgcaattacattatctgggatgtcattcacaactacactgcctgcaccaataattgaattacgtccaataattgtatctggagttacgctaaaccctgcacctagccagacattgtcaccaatgccgatcgaatgtgcaacacaaccaccggcttttcgctcggctggatcaaataaatggttgctggtatacaagccaaccttaggaccaaacaaaacattgtttccaatataaacaggcgcgccatctaaaatcgtgcaatcatagttggcataaaagttatccccaacatgaatattttgtccaaattcacaacgaaaattagggttcacgaagggatgctcacctgttgaaccaaagagttctttgattaatatttcttttttagcgtgatcattctcattattaatattattggtcttcaaggtagcaaggtctctcaaggtgccaaggcgaggatccgcatcattataaggacgaccagtagccatgtaattaaattttgttctaagcgacatgattctttcctttcattagttcttctatttttattatagaaaagaaaaagcgctttcgcatgtttgacgcataatatttagcacactagccctaatcttattgcttattctataatggtaaaaaagaaaggattaaagccatgaaaaacttcaacaaatttaccgctaaatttgctcgccttttacagaatctactagtagtcgcaattggtttactcgggattattctgatcatactcttattccgcgatctaattccactttgccaatcattattttcaactaagatcgaagaaagcaactccgagattatgtcagaaattatcgttttcttactcttctttgaatttactgcaatgattatttcagccttgcgtcatcacggtcacactagcatcaattttctattgggcttaggtgttactgcgctaattcgcagtctgattacttctcatagtaacatttggagtacgcttgccacttctgcttcaattttagtactagtaatcgcaatggttattttcaataaaaatctgcgtaatatgtaaaaaaactgtatcactctaggctaatgtcattggagtgatacagttttttgttttactaattaactttgcgccatgaactcattaagttgtttcttagaaaaaacattgccatatttgcatactacgtttcctttcattattgaacgtaattcacacaaccaaaaaagcatcatttattaacaatattgaaaataaataatgctttttagtaatactctgatgctgaatgccagagtcgaactggcgaccttctctttacgagggagatgctctaccaactgagctaattcagcaaactcacaacacatgaattataccaaatgtcgctaattggcgcaacgacctttttctaagctagcattcaaaaaagaacattatttccaatctaagcacaatccttgcttgtgcaattcttctggcaattgatcacgatcagtttcatgcagatcaagttttttacctgtaatctgcttagtgaatgaatcaatgcgacggttagaatcacgtaagtcataatatgtcgtaactatatcatcatagtctttaaggtctttcacatcaaagtctttcttataactaccttcaaaacaagtgaacttaagtggtaatcgtggttttaattgtggcttttgatctggcataccgacttgcatccccaacactggaaaagtcaactcaggcaaatcaagcgtcttaagcaaatccaacggatgatcgttaaccgtaccaagtggcacatagcctaagcccatactttctaccgcattagcgacattttgaaaagcaagcagcgtatcttctattgcttggaaaaagatatcagttgtgtgaacacggccgtcgtctttgtcaagttgctttctaatttgttggttacggtacaagtcaacgataaaaataaacaaatcgccttctgcaccaacatatttttggttacataacttttgaattttcttcttttcttcaggatcggtaacgtgcagtaagctagcattttgcataaacatgctggttggagtttgaccaaagacagaatacaaagtttccagttgttctttagtcaaagtttgatccttaaattttctaatagaacggtgatttaattgcgtgtcgattgtttcgttatgtatcattttcatccttcttactaataatcagtaagttcattataacaaataatatggctacttttcttcaaattcaattccgtaatctgcttgctctccgtgctcagctaaatcaagccccattaattcatcttcttttgatactctaattggaataatccttttaagtaataaaacgattatcgtcgtcatgatccctacaaatatgatagtaaataaagttcctaaaatctgagctgtaatcaaatgcaacccgccaccataaagcaagccattttcaatttgcgggttaacaatcttagtcgcaaataatcctgtcaaaatcgaacctacaattcctgaaacgccgtgacagccaaatacatcaagtggatcatctagcttcaattttggcttaatcacatgaatgaagccgtaactggctagtgtacaaataaaaccaatggcaaaggctcctgccacagtaacatagccagctgctggcgtaataccgactaatccacacaaggcacccgtacagaggccaatcatagtagtcttttctttaataaacatatccaaaaacatccaaaccacaaatgacgtaccagttgcaacagttgtagttaaaaacgcttgtgtagctacatcgcttacagttaaggcagaaccaacgttgaagccataccaaccgatccataatatactggttcccattaaaacccatggtaagttataatgcttaacctcaccatttggatcaaaatcaattcttggaccaacaaaaattgataaaaacaaggcggtaataccggcggtaatatgaactacagtcccacctgcaaaatcaagcatccccgttttggctagaattccatctggtgtccaaaccatatgaaccattgggtaataaatcaagatcgaccaaattgcgacaaatgcaagtaaaaatttaaatttcattcttccgaccaccgcaccaacaaacaacgccggcgtaataatcgagaacatcatctgaaacattaaataggtcaaaattgtgatgcctgaatccttggaataaagcgtctttaaatcaaagccgtttaaaaagacacttttactcaaaccaaatattccaccaacatccttacccaaagccaagttataaccaaaagcaataaacaaaacgattgcgacacctgtaatcatgaatactgaaatcatcgtattcacagcattcttctttgaaaccatgccaccatagaaaaaagcaagtccaggtgtcataaagaaaactaaaacactagcgacaaaaacaaatagagtgttcgtttgattaatcatctttttttctcctcaaagtaaaatagttagtcctaatattttaaattggtatatacactatttcattgatgttgcagcatatatgcttaattaaaaaatattggtttgataaaatttaattctcattatacactcatttttcttcttgtcattaattttctataaaaaataaaggtgcatagacgtatggcttctatgcacctttgcatatatttgcttttaattatttgttttcgttttcaagattgttgattgcagtttcaaccaatgcatatgcttgttgagcttggttcttagcttgaacatattcgttcaagttgtcatcaccattagtaagcacacgtgcaaatgaaatttgttcagccatcaagaagttgaacaatgaatcccacttcttgtcttcaaacttgatttccttagcagaaattctaggcatcatttcacgtgtggtattaaatgccttttccaaaatttgttcatctgcatcggttaattcacgcacattgtatgcttggtggatttggtgaacctttaaaagttcttttaataaagttcttgcttgtgcatcttttgaaactgattggttaatttttaaagccatttttacctactcttttcttttttattaacaattataccaaattgtcttcgaccatttgcttaacgcagcgtttcatttctttaatatcaagaatactgtaggcaaattcttttctaagtagttcctttggcaaatattgatcgtacttgtcgattcctggcacttcgtttggataaaccagatcaagcggatcaaagtctttatcagcttcttcgcctaaaatgcgccagaagtcatgctcatcagcatccatggcaaaatacatgaagtatggtctagatgaattaaagccacggatatttaactttttaccgcacttaattcgaattaatcgctctagtgccaaaaatgcataagtcccagtccatggaaaaagacaccacatattaccgcccagcttgatcaaattattctttggcagaccagctaaagcggcggtgtctctagcttgcgtcaagcgagctttaccattttgcatcaaatatggatacatcatcttttctgcaagtacctttttcattctctgtaaaattttaggttgaatatctccaggtacatctccaaagtaggcaggaattctaccctttacttcatggcaatatacttgatgacgcttgatatccacgtcttcgacaacccatacacgtccagcaatcgcaatcttgtctcctacaggaggtggcttaacgatcgtacctaattcttcgctgccagcgtgaacactgaattcctcgttttcttggaaaactgcgtaaaatttaaagttattcacaactcgttcaccagcaagaccaacgatcagaccaccatcttcagtccactcaatgtgacctgttttaagcaagtgtttgagcaaaacgcgataatcgtcttggctcacgttgtggaaatatgacaaagttaacacccgtgaagcaagttcagctggcgtcatttcaccgcttgaagccagcgtactcatcgtctgatgatagagcaaactatatggcaaacggttaggttcaggtggctccacccatttttcttccgcatacagttgtaccaaggcaatcccttgaagtagcggccacggaatcagttctggcaacatcgctcttgattcagggtgttcttcgcgcatgacaaagtgcatctctgatggattaccgcggcgccctgtccggcccattctttgtaaaaagccagacacagtaaatggcgcgtcaatctgaaaagcagattctagtttgccaatatcaattccaagttccagcgtagctgttgcacaagtcgtcatgtagacatcgtcatctttcattgcggcttctgcagtttcacgcaaggcttgagacaaattaccatggtgaataatgaagcggtctggctcatgattataggcacaatatgctctgagctcctgacaaacagcttcacattcttcacgactattggtaaaaacaagacactttttaccacgagtatgctcaaaaatatagccaattcctgggtcagctaattctggtgccttatcagttttcggttcgatttggctcggatcaaagtccctggaacttgcttgtggatttgttttataaaaatgttccatagataaatgccaaatctgtggttcattttgtacccttggtgtaacagtttttctgtttgaaccagcacccaaaaacttgctggcatcttctaaattaccaatagtagccgaaaggcctattctccgtggatttacattagctagttttgataaacgctcaattaaacaaaatgtttgtccaccacgatcacttctaagaaatgaatgaagttcatcaaccacaatatattttagaccaccaaaaagatgcggaatatccatgtgcttattgatcataaagctttcaagcgattccggcgtaatctgcaaaatacctgaaggatgcttgagtaacttgcgcttttgtgtttgagctacatccccatgccagcgccaaactggaatatccacatctgtgcataagtctatcagacgatcgtattggtcgttgatcaaagccttaagtggcgcaatatacagaacttttactgaatcttctggctcattataaatttccgacaagatcgggaaaaaggctgcttcagttttgcctgacgcagtcgaagccgacaatagcacattatgatcggtgttaaaaatttcttcggccgccgcaacctgaattggtcttaaacttttccagccatgttcatagatataatcttgaataaatggcgcataatgtgaaaaaacgtccatagtccatttccttaaatcttaaattcggtataatccttttccgcattatccgaaacagcctctgacttggtatagctgaattgatccgagttaagcagatcagtgatctttctatcaggattctgccaaacaatgtcgagcagctcaataaagtcacgaataatttcacgtggcgtgatattggtatccgctccaacacgggcatattcaatcttaataaattgagccaaatcatcatcagtaatcgtgcgctcataaccgtacaaattggcatgcatgtcagctagtttttcagtcaaaaccaacatttcttcagcggttaatggttcaagcttaattactggcgcatacatatcacgtgctccttcttgagcgaatttgcctgaagcaagtcggctgcgtaaagcttcgtatgaataaactccgcgacgacggtctttaactgcttgtggcgtaccacacataataatgcctaagtaccttgctttgccctgcaaggtatcgttgtacatggtcaaaatcttttcatagttgtactggcggctaattgcattcggaattttatagatattaaccaattcatcaatcataatcattaaaccagcatagcccgcttgtctaaagaaagtcgcaaataactttaaatattcataccaatcactatcactaataatgatatcaacgcctaattcctttttagcctcagtcttatggctatattctcctctgaaccacttgactactttagccttagtctcatcatcaccactcatataagcgtgatagtacatgttcagcaatttagcaaaatcaaatccatgaactaattcgtttaatgaagaaatgacgccatagattttctggtcaactgcttgctcaaatttaggatcatcattatttaagcctgtttcttgcgaaacttgcatctgcactgaattaatccagcgatctagaatcaaagtcaaggcaccgccttcaggcctagtcttagttgataagttctgaattaattcacggtatgttgctaaaccctgtccttttgatccttgcagccgacgttcaggtgataaatcaccatctacaacaacaaaatttttatccatcacatagttacggatcgtttgaagtaaaaagctttttcctgagccataacgacccacgataaaacgaaagcttgctccgccttcttgaataacatccacatcgtgtaatagggcctcaatctcggcctttctccccacggtaatataaggtaaccctattcttggcactaccccaccctttaatgaattaaggacagtttgcgcaattctttttggtactcttcttttttgtggcatgatttcatcccttcaaaaacatatcttttaagtcatctacataatcggtaattacttgtggttggtcctgttcgttattttctaaaaccacatcaccgaattcatcaaataatttttcattaatattatccatcaaaattgatgccattaaatggtgctgcttcaaataggtctgccaaggctgctgcatcagcaatgcagttaagaaaaacatttcattttcatctaagccatattcattatcaactttgacagtttcatctgcttgtttttctacttcttcttgcgcttctgcctgctctagctgcttttcctcatccgttaacaaactatcacgcgtcttcgaagcattggcccgaatttgatccaaatcggagaaatcaatcttaatctgatcaatctgcgcctttttttcttgaatgtgatattcagcaatccccgcgtcaattgccttaagtacagcttgatcaataaatcgcggcttaatcgaccgacctagtttaaattctgttcgcgccactctatctaattcatggagaaaattatttaaattaacccgctgacggctgatttgttgatcacaatgaatttgccattttccttggtaaaaatgatactttcttactgcatcaatctgatggtcagctacttgttgttgtcgcagataaaaaacactgcctacaaagattggcttttcaattatatcaggcttgcccacaaacgcactgtaatacgcaatgccgtattttttagcatccagcagctccagccacacgtaacgcaacagttgaacaaataacttttcattcttatacgcgtggtgctagttaaatcgttttagttaataaaaaagtccaatcttgttagactcgacttgtaaatagtaataatagaaaagagtctgatctgattgaactgccttaagcttaagcgttttagccaccatttacaagttagttttaaagatttagtgataatttgtcggcactggtatcgtttgtatgcaccggctgagtttactcatcggcgaaatattgatcaaattaaaactacggacagtctgattttggctttacttatctggcaagctaagacaggaattgaatcacaaagaagattctgtgaatgtttcaattgtttatcacactcacgttttaatcggcgttcacgtcagctattgcaattgatttatcagatacggcaagaaatgaataaaaaggttgacctgaatggacagttcttgatcattgacagctttccggtacctgtttgccaaccaattcgaaactatcgtgctaaaatttttcgcggttatgccaacattggttataaggccaccaagaaaatttacttctatggtttcaaagttcatgccattgttagcgatgacggttacattcttgattatgtcgtaacaaaggcatcagttcatgatgccagggagacagttgaactgatagaaaatacccatccatctaattactatcttcttggcgacgaaggctatttaggcaaagaactgcatcaacagctaaaacaaatgggttacgaactttggacaccatatcgtaaaaatatgacaggagctaaaaagcacaatgatcatcaattgatggctattcgcagaacaattgaaagcgacttttcgcttctgacctattacaatgccgagaacaatcgagcacgtagtctgataggctttcaaagccggttggaaattgcaattttagcttataatttggcttattgtctagaacgatttaactagcaccacgcgtattcttattaataactttagatgaattccaataagtcgttttctttgcaaagactgctgctaactcttgcgcagtaaatttttctggatggtgtaaaacctcataatcatgatcacgcttaatctcagatgcaaagcgctgcttaataatcttttcgtctaaatcataataaagaacataatctttgagccagtcttgtaaatatacatcaatactaatgtcaaattgtcgcacatatttttcttcaaattctaacagcttttcatatccatcttgtgcgtcatcaacaccaatattgttcagtaattcataaatataaacaaaggcataggatgtactcgttttttcaaaaacatgctggcgaatcttgctgcgccaagtaaagtaacttctaagctgcccagtattcatatcatgataagttggataaaaacgcttaaaggcaaaaaattcaggataatcatcatcatagtcggccatcatcctagcctgttgataaaaattcttagctcggccacgactgggcaaaatactgtagtcataaacttctagcatctttctaattctatctggaaccagactattgttatgcttcttgcgaagattttcacttggtttaattgcttgggcttgatagcggtcatctactttatctggtgcaatataaaaatattgattctgggcgatatttacttcatcaccattcatcgccagtttaaaagcaaaatcaagtgcttttttgagtgaatcttcactaactttttctaatattgccccaacccaatctgccgccttgatcttcattggatcagtgaagccaggcaaatctcttattagtgcagccattgcaccacatttcaggtccaatatactctgaccttgcccacgtgataatatcgcaaaataaccactatcaactggtgacattaaaacgtaaacgctagtggaacctggtacagcaggcttaaatttcaaaccatatttggcatagacatatttgaagagttgatttgaatccattttgtctcctttttttcgcacgtacgttcattatatcatcgatttattttttaccaaagtcacgcatgtcagctcctcatgtacatttttaagtttcataaattttatatttttatatttgtgtggttattaacaaacaattatgttactatagtttatgtaagttattgaaagcgtttttataaaagcttcctagagaggacaaaaacttaatatgagtacaaaagaacgttattctcaagatgaattaagaaaagataatccaatgtttagccgcactcgtgccactattgaaagtgcattttacggcaacaatgtccacgaagtaaccagtgttgcagaagcttataacttagctaagaagcaatcaggcgttattgttactgacttgccaatcttacacactaaggaattaggtttgccacatggcgcaacccaattggtttacaaccacggcaagattttaggtagaactgctagcgcccgtcactttgttgacaatcctaatgaagatgctgaagcattggacggcaacctacgtgaagatatttacaaggggcatgaacaaaagtacttaaaggctactgttttagtaggtcttgacccatcattcactgttaaggctcacattatgatgccagaagatcaagccttcaaccttctttcatacatcctcaacttccacttcttcgacgatgaagctgaaaaattatacgaaaagtcaaagttctacgatgaaccagacatttacttctacttcgatccaaatgttcaagacgaagattaccctaagggcttaggcgtgtttgacgctccacataactgtgccgctgtatttaaccttcgctacttcggtgaattgaagaagggtaccttaaccttagcttgggctatcgctcaccgtcacggctacactgcttgtcacggtggtgaaaagtcattccactttgacgataaagacgacaagacctttgcattctacggcttatcaggttcaggtaagtcaactttgactcacgaaatgtacgatggtaaatatgacatcactgttttacacgatgatgccttcattatttcacgtgaagacggttcttcagtagccttagagccttcatactttgacaagactcacgactacccagctggccaccacgagactaaatactacaccactattatgaactgtgatgtaactttagacaaagacggcaagaaagtcatcgtaactgaagacttacgtaacaacaacggtcgtgttatcaagacccgctacactagtcctcaccgtgtagactttgaaaagtcaccaattactgcattgttctggattatgaaggacggttcattacctccaatcatcaagatcgatgacccagtattggcaactactatgggttgtactttagcaaccaagcgtacttcagctgaaaacttacctaagggctttgacatgaatactttggttattgaaccattcgcagacccattcagagcttacccagtttcaggtgactacagagacttcaaggaattgttcactaagcgtggtgctagttgctacagcttgaacaccgacgcatttatgggtaaagacattcctaaggaagttactaagaagttaattgaagacttagctaacggcaatatcaaagacagtgacttcaagccatttggtaacttcaagggtgtatcatacttacctattgaaggctacgaagttcaccttgaagacccagaataccaaaagaccttgaaggatagaatgcaagatcgtttgaactggctcaacaagtacgatgaagaacacccagaaactccaattcaagatgaagctaagaagaccttggaagctatcatcaaggaattgagctaatattaaggaaatgaattagtgtctcattcaattaaaatttaatttcttaatgacgaaaagacgagagttgaaattcagctcccgtcttttttattgctcaatgtaattttgcttctgtagtttggcatctatcagtttataaacttgcactttattctcttgtgcaagttgtggattatagttatgtgctatttcaatgacaatagccggcaattggtagattatcttatgaatggcatcactatttttagggtctaaacttgaacaaatctcatcaagcaaatatatcttcttagaacgaattagacctctaactaaagcaagtcgttgtgcctgaccacctgataaattgttcgcgtcatctgaaattaatttatctaaaaaatcattgccaaactcatgaatcagtcccatcttttttgcttcatgaagcattagatcatcaggtatgttttgcagaagtgatagattctccctcactgtaccttggaataaccagattctttgcgagatcttgatgaaatcggcaggattaatttgatgaccagcaaaggtgatttcaccgttatacttcagattattagcaatacaattaattaatgtacttttcccaatgcctgaagccccagtaacaatgatcttgtcatgatcacgcaaagttaaatttataccatctaaaattttcttatcaccatatgaaaaagacaaatcttttattttcaaaatagcttgagagtcatgattatcttgtttaacactttcactttcttcaaaattatagctttttatttttctaattgcatcggtgctatgaatttgagtctgatacaaagcaattgttcttagatatcccacaaccctatcagctgacaaacttaaagttataatggccgctaccgttacgttaaaccagcctctctgcataaaaagcaagccaataaaaattggtagcaatagtgtaactaaagagattaaccatgcaatgaattgtacctggaattgacaattattcatcttacgatatttgtcttcctcattaaccaagattcgatcaaatcgtttaaagaaaagatgtctgacaccaaaattcagtatttctaagcgtccttcaaatatatccttcattgcctgaatcaactgtgagttagatttattccatttttcggttttctcattcatcctcttcttgccaatatagcttggaatcagggttagcgctgaaagaagcaaataaataattcccaaaatcagattagtttctacaacaactattgccgatgcaaccacattaaatacaaactgaactatgtcagttatcccaaagaaatatttttgttcaatttctttagcagtaccactaatcgaattgattacatctgctcctcttgcttgcttcatgtctgaattagcaaatttagaataaaaatattcttgctttaaagcaatatttaatagcatcacaattctattttgaaccaaataaaacaagagcatggctatgtagactatcagatatgcgccaaaggctaagccaataaatttataaacgtggtcaatgttactaaaattgatattagttaattgtccaaacagtacagcatttaataccccttcaaatgctgaaatggccgataaaaccagaaaaactatttgtaaatatattggaacatgttttactacccatttaaaatttatttgttgtgtgttcattgtttaatacccacatatttctcataatcaacaagccaatcttcatcatttttataagaatgattcatacactttttaaacccaattgctttaaatcatcttcatctttagtttctaacaattgtcgctcttctagagacaagtgatacttattcactaaggcatcaatattctccaaagaaatatttttaccatcagaaagatcctttcttcataccttcagacattactatacctcctattttctctcgttaagtaatgcataattttcaacttgcaatttactgtgtatgggattgatatcaatgcttcccataattccccaaatgcttataataataacagtaagtattctcttattttttaatttcaaagccaggaattcattatgtacggtcaaaaatttaaagcacttcgtcttcaacaacatatttcactagagcaagctgctaacagagttatctctccatcgactttatccagatgggagaataataagattgatattcgcttcaatttagttattaagcttttagacaatattcatataaacctaaaagagtttactaattactgcaaaattaatcatagtaatccatttgttgcgaaagtggctatgtactatgaagccaacgatgatcgtcatattttgcaattaatacaaagcaagaaaaaagaataccaaaattcacataatcaatttgatttacttctactagctatcgcatgtaattgttattacgatctaactgataacaatgttttcccagtgagctatcaaaagaaattattctacattttatctaacattgaatattggacagagatgtacatcaatgtttttggtaacactgtttttctctatgacagcaaggaactatatagtatttcaatcagaattcttaaaaatttaaattctaatacatttaatgattttcaagaatattattatgctttatcctctgtcatcaacgccctaaccgctctaattatcaaaaatcccaaattagcatcacagcttttaactaaaatagagaaagtttcaattcctaaaccaatctcttacttaaaaattagaactaatgtcctcaagtatcttttagattaccgtttaggcaaaacagatgaaaagcttatctcaattaagctagaaaatttaaagtggttaggattaacagatattgcaaaagacttaactttcttctttaaccgtataaaaaatgatcgttcacctctttcctaattcatttgcctattatattaccctcatttttatctaattgatttttctttgcaaatatgcaaaattatttttagcaagaataaaaaagcctattaaatctaggtgtttacaaaccctgatttaataggtcttttatgcgtcttttttattgctcaatgtaattttgcgccttagttaaaatatccatcttctcatgttcagttaaatacttttgtgcttctgccaaattgacccatttactagctaaaatttcttctttttgaatgttaacctcttgtcctgcaacatagctagcaacaaaataaactactgtcttagctttatcaacagtcaactgatattctgttttttctctaaaagtaaagtcaaaattcggctttaaaccaacttcttcaaaaacttctcttctagcagcttcctcagctgtctcattattttctaaatggccttttggaaagccccaattatgatttacgacgctctgcacgatcaaatatttcagctcgccgcttctacgttctctgtaaataactgcacctgcagaatgttccatcttcatttttgtcacccaacctttatattgcataattattaaatatttattaacgtatgtcaagcaattgtaatcaaaaaaatgaccagatctttgacgatctagtcactttattcgcagacgaaattattaagttctattggtagaatattttaagttacttcttcaagttcttttcgcagtattccttgaccttgtcatcatcggccttaagaatccattcaactgcagcctcagtcttcatggtgtctcgaccatttacttccatttcgtggtcccaaatagcgtcacgaataggcatttcattacccttagcccagtcaaaaacttgatccatatttctatcaattaatgcagtttcttcaatttcttttgcatctgccataattaaaagcttcctttctgataacgactttattgtagttctattagctacaactgttaacaaaaagggacttttttatttaaattctaatttttgccattaactgcttcatcagccttattcactacactaaccgcattaagtgaacgaggataaccaatgaatggtacgttttgttcaatgaccttcatcaagaattccttgtcattgcctaatttgatatttgcttgagcatgggccatcaattgaggttcacagccaccttgagctgcaatataacagaaggtaatcatttcacagtcattgtcatccaagccttttctagtgtagtaatcgccaaagcaattatcaactaaccacttattgattgttcccttcttggcaaaacccttcatttgtggaccaaacaagcgcatttgagtttcctcacccttttcaaggcgattgtctagtgtagtagttgcttgacccgcaagaggtaattcaacgccgcgcttagttaaaacatcattagtaatcttgaaaaatggggaaactctacccaaacctaaataatcaaccgcttgatataaacttccttagcttcaactgggttaacaccattgtctagtacgactggaagcattatttcatattcttccttgccttgcatccccaacaaataagctaaagttgacaacatcttagtccggtcgggcaaatcaacgtctttttgcacttcgtcaaaagcaaaatgattaattctttccaaagcttctggatcagtagccttcaataagttggcatgtactctttatgcatcttctttaattgacataataaattcctttctaaacgcttatctctactatttatttaagtacgattgagtctaaaagaaaaatatctattttttattctgcaatataacttattcttatcaaaaaaatatcctaaaggctttttgccttcaggatatttctattaggttatttaattagtttttcttgtctgcttcagcatcatggtatgacttaacgatttcatcaactaattctggatcatctttcaaatcagtagtttctacaatgacatccttcaagtcttcatctttaagcatttgcatcaacttaacgctttccttgtcgttaggttcatcaaagtgataaattctaccaacagtttccatcaatgcactgtagtccaaacctctgtccttcaattcacggattggacggataaatctttcattgtagcctaacttacggattggagttctaccaacacgagcaatatcatctgaaatatatgggttttggaatctgctcaaaatcttgttgtggtattcttccaaactttcttcggtgaattccttgttccacttgtggtaaagaagtgaacgggtttcactcaagacacgcttaacttgctttaaaacaaatggatccttaatagcatccccaatagtgtcatagccaaggctcttgccagtataagcaacagttgcgtgtcccgtgttaactgagaataactttctttcgatgtaaggttcaaggtctggtgcatagtcaacgccctttaacttgatatccttgttcttcatttggctttcgtcaataacccattccttgaagtcctcaactgagacaaacaatggatcgtcattatgttggataggaacaattctgtctacagctgcgttagggaagccaatgtacttgtctagttcaggcttaacgtcatcgtccaagtgcttataaacttcttcttttaagtgttctgaaccgccaatcatgttttcacaagcaatcacatcaagtggagtagtgttgcctgattgaattctagcagttaatcctttggcaattaatggagcaatgattgccaaaatctttggaccaatggcggtagttatcatatcggttgatttaattgcttcaactaccttgtctggatccttagcattgttaattccatcaacatttgaaacatgaattctcttcttaccaggtgcggctaattcaatgtcatattcaccacgcttgtttaattcatcaataatagtttcattaacatcaacgaagtcaatgccaaaaccattatctgctaaagtttcaccaataaatccacgaccaatattacctgcgccaaaatgtactgctctcatgtttaatctcctacgttctttaataaatcaataatttcttctggtgtttgtgcgtctgcaagctttgcaacgttggaaacatcactacagaaaatagcaatctgtgacaaaatatttaagtgttcattgttcaaaccagcaatcccaaagacaacggttaccaattgctcggtatcatccttagggtcactaaaatcaacgcccattggaatttggactaccgaaattccagtttttttaatgtgcttcttaccttcgtcagttccgtgagggatggcgatgaaattacccatataagtcgacacatcttcattacgggcaagcattgaatcaatatactctggttcgacacagccgccatcaactaataattgaccggccattctaattgcttgatcccgcgttggtacgtcttgattaagtttgatcatttttggatctaattgtaatgccatttagctcatccctttctaattcaacttttgaatagcttcgccaagctttttatctttaagtaaatcatcaacaactagggtttgaatatcactgtatctgacagccaagttcttattagcagctggagtaacaattactaagtgacttggatcatcagtcaattcgttgattcttactgccttaacaggagtagtcttaccagccttcttaattgcgtcattgaataaactagttgccatagtagcggtacctaagtgttgatcgtgacggatgaagtccacttctttaactttactgaagtcgattccttcaagtgaaccaaccttcttaactggtttttcagcctttggcttatcttctacttgagttaaagctttgaagctagctacgattgtgtcatatttcggactactcaagaagttgccaaccgccacgtgcattgcatgtggagtcttttgtaaagcgcggtcagctaattcttcttgcgtgatgatcaacaaaccatcttcatctttcaagtttctaacagcggtattggttactgaaaccttaatgccagccttcttgaatttatcacgcaaaagtgaagcacccatagcagatgaacccatacctgcgtcacaagcaaagataattttcttaacattggcatatgacttaactgattcatgtgcatcttcagcttccggcattgattgacctttagattgggccttcatggcttgcatttgggcttgttttgcttctaactcatcaccagtactcttgtcgtttttaagaataattgcggcaataatgaatgaaacaactgcggcgccaagaacaccaacaatattaccgaaataagcatcctttgcggaaacaagcaagatagctaaaattgaaccaggtgaagcagctgcttttaatccaccaccaagagtagtgaataagaaagtaccagtaacaccaccaccaatagcggctaaaatcaatgatggtttcattaatacatatgggaagtaaatttcatgaaccccaccaaagaattcaatgatggcagcaccaggagctgagctctttgacttacccttgccaaataaagtaaaggcaagcaagattccaagtcctggacctgggtttgattccattaagaacaaaactgacttaccaacttgtgcagcttgttggatacctaatggaactaagatcccgttaccaatagcgttgttcaagaacaaaactttggcaggttcaataatgatgttggctaatggtagtaagtgaactctaataattgcatttactcctgcactagcccattgactgccaacttccataatcggtccaatgataaagaaggcgaaaatcgcagcgatcatgcctagaataccaagtgaaaagttattgtagatcatttcaaaaccagatttaatcttgtcctggaatacttgatctagtttcttcaataaccatgcactaagcggatccataatcatggcacctaagaacattggttgatcagtaccaacaattacacctaatgtaccgattgcaccagcaatggcaccacgttcttcataaaccatgcgaccacctgtataaccaattaacagtggcaacaggtaatgaagcattggttgaactaagttattaatttctttgttagggaaccaaccgtgtggatacataaagaatgcagcggtaagtccccaagcgataatggcaccgatattcggcatgatcataccggataaagctgtaccaaatttttgaaccttcactttaacagaagatttactttttgcttgagccattttcttcttcctctctcatcaacttacatttttattctaagtcaatcagtaagcgcttacaatgaaatgaaaatagaactctggcacacttttgtgccagagtctgagtttacctattctattaagcttttgaaatattggttacctagtaaccgatctttgaggtcttgtaaaaaaagtgccgcaattgcttctttaatttctttttgactgccatttgtaaataaatctaagttttgactagacatgataatcatgctggaaatagtactcattacccgctgttcgggtgcagtaagattgtctggtgccagcatcaaaagaactcttttgacttgaatggtatcatgatccattgattggagcgagatttcattatctaagtcaaacatggtaaatgaacagcgtgtaatttctggactacgtgtgtgtagcaatgcgatatggctgttagggatgccaactggtgccattcgtacacgtttgagaagatttttggcaacgggcatttgcttacgaattagtgttgaatccgaatgggctaaacattcctgaattactgcaattaagtcttgcgaattgtattccagttgttgaatcttgattccgttgactagctccgagcaaaataatgtactaatcgatagcttagcaagttgttcgactgaatggggatgtttttcttcaactacctgtttagctggaactggttgaggatatttttgttcataatcttttaagtaagcgcggatttttattaattcatcatcaagcagtaatggactaacaagtaaataatctcttgagaagcccttcaatctcaaggttgaaaaaataagattgtaatttgacaagtctatttgatttaaggcagaaacacggctggttttgacttctttgatttcagaaaattctctttttagtttggcacctaagattgccgacgttccaatgccattttcacaaattactagggccgataaattacgctgctgattgcgactcgtgtattcattggcaaaataaagcaagatcaactgcaactctgacgctgtcaaataattttctggaaacgctaaatgccaatatttttgaatagctagatataaatcaggaaacttttgactaaggcctgccagaatttcaataggtgtatctggtaaaagagctactttatgttgtactaaaccaataacgtgtttcgtcactttagtcataaaactatgatctttttgaaaatcccaatgcatttcttcagaaacgtgttgaacgaattcttttactttgactgagattgctaattcgcgctcattataagtcaagtaagtgttgtgataatcacatgataataacttattagctaagtatgagacatcattttggtcaacctcaacttgccgcttttgcgcaaacaaggccataaaacggtaaacataaccctgatatttaagtgaatcagcactggggtggataaaatctagcttgcatcccgccagagttctttttatcgttaccgcaaaagttaaaattaactcaatcagcttttggtcactgtctagcttaattttaccaaacacgctttttttaagacaatcagcaacctctactagcaaagccttatcaatcattgtcaaaaacatgtctttgcttgtcgtttcattatgcagatacttaaaaaagttatattcattgatctgattgagcataatatcaactaaaacctgacgccgtattttttcaggcgcctgaattaacagtcccacaccctttttgcggatcaagtcaatatgatatcgttttagcgacctttcaaccgtattcaaatcactttgaatcgttgcttcactgacattcaggtcaagcgcaaattgaataattttacatggctccgtacttaaaagcaacttagctgcaattatcttctctcttttagctaccgaaattacattttgactgtgagattgttgcacagattgcttaatttcttgtaattgctttgaatcgccagataaaaaatattttcctttttgattttcaattttaaagtcgttcttctttaaatcgccaaattcgcgataaaccgtccggcggctgatctttagactctcttcaatttgtttgatacttaccccactcggatttcccaacaaaatttgaagaatgtgcttttgccgttgtgttaaaaacatcccatcatcctcgcttacgtttaagtttattatacttgaacgcaaaaaaagaagacagatctcaaatctgccttcttgaggatatttatttacatattaattattcaacagtaacactcttagcaaggttacgtggcttgtcaacatccaaacccttatcctttgaagcgtagtaggcaagaagttgagttggaactactgtcaaaagtgctgacatgtagtaattaatttctggcaacacgatcgtgtcatcactatttgcgaattccttgcctacaatagtaattactgaagcaccacgtgaagcaacttcttgaatattaccacgagtaagatctgcagtaactggatcgttaatcaaggcaataactggagtgccatcttcgatcaaggaaatggtaccgtgcttaagttcagctgcagcaaagccttcagtttgaatgtatgaaacttccttcaacttcaaagcaccttcaagtgcaacagcgtgatcaataccacgaccaatgtagaatgcgtttcttgattttacaatatattgatcagctaattccttaagcttttctttaccgtcaacaatttgttggataccttcagcagcgatggctaaatcatgttgtaagtcccaatccttagcatcttgattaccaagtttttcaccaagtgccttagctaaaatagcttgtaaggcaacttgtgcagtgtaagccttagttgaagcaacggcaatttcaggacctgcacctaaaagcattgtgtagttagcttcacgtgataaagttgagccttcaacgttagtcatagtcaaacttggaataccacgcttgttagcttccttcaataccacgcgtgagtcagcagtttcacctgattgagtcaagaaaataaagaatgggtgcttgctcatcattgggaagtggtaaccagcttctgaagcgtaaccaacttcggtaggaataccagtgtagtgttcaaaaatagttttaccaactaaacctgcatgataactagtacctgcagcaaagatataaaggcgatcagccttagaaatagcatcaataatatcttgatctacctttggttcaccattttcgtcaaggtagttttgtgacatgtgacgcattacgcctggttgttcatcgatttcttttaacatgtagaattcgtaagtaccctttgaagctgcgttagggtcgatgttcaaaacgtgaggttcacggtctacctttttgccatcaacagtttcaatagtgtaagaatccttggtaatgtcaccaacatcaccatcttgcaagtcaacaaaagtcttagtttggtcaagaacagaaatagcatctgaagcaatgatgttaaagccatcaccgattcccagcatcattggtgacttgttcttagcaataaatacgtggtctggttctgtgttgtcaacaagcaagaaagcatatgaacccttaaccaacttcaaagcttccttaaatgctgaaaaagcgtctaagttcttatcacgtgcaattttaccgatcaattgaacaactacttcagtatcagtatctgagtggaacttaaccccttgcaagtacttttcctttaattctgtgtagttttcaatcacaccattgtgaactagatagaaacgcttggtttcatcaaaatgagggtgagcgttatctacagttggcttaccgtgggttgcccaacgagtatgaccaataccaactaaaccttgttcatctggagtcaacttttccttcaagttagaaatacgaccaacagccttagttaagtattcgttaccatttaaatcatttaagtaaatgccagctgaatcgtaaccacgatattccaagttggttaatccatttaaaataatatctcttgcaggcttacctacaactccgacaattccacacataattttctcctttggtctagtttgctttgaagtaatggactagcttatttttattgttacagtaggtataatagtctttttgcaaaaatcggtcaagtacaaatattcaaaattggtattataattttaagcataaaaaatggctaccagaatttgctccgatagccatttttacttaagtcaattttaacttttattacttgtttttgatacccttaccttcatagcagtctctcatcaattgagaaatttgactaattaatggagctgatgggttagtaacagtgttttggtcgccataagcttcaacagctaattggtccaccttcttgtcaaactcagccttatcaacgccataatccttgaaggccatcttaataccaactgattcagccaaatcaataattttctgaactaatttttcaattaattcagcatcacttgaaccagttaagccgattgctctagcaatttcagcatagtcgctttcagcacggtaaactgagtaatgtggccacatagcaagtttttctggacgcttagcattaaagcgaatgacttgtggcaaagcaattgcgtcactgacgccacttggaatatcaaaagttgaacctacggtatgagcaattgagtgttccaagccaaggaaggcatttgaataagccattccagcaatcgtagctgcatcatgcattctctttctagcatcaagatcgccatcgtaagacttcttcaagttagcgaaaattgctttaatagcttcaagtgaccaaccacgagtgaagtcagttgccatggttgaaacataactttcaattgcgtgacctaatgcttcaaaacctgaccaagcaattaaacgtttgggcagcgtttgcacaaattgatcatcaacaattgaaacatcaggtgttaaagcatagtcacataaggtatgtttaattccagttttggcatcggaaataatagcaattggggaaacttctgaaccggtacctgaagtagttggaatacatacaagttggacaccattaatctttgggaaacggactactctttttctaatgtctaagaatttttggtaagcctcttcaaaactcatttctgggttttcgtagaataagcgcattgctttagcagcgtccattactgaaccaccaccgatagcaattacaacgtctggcttgaagatgttcattctgtgaacaccatccttgatcacatcagtattaggatcaagagttacagccttaaagacttcatattctttttgacctaaacgcttagaaatgatatcagtaacttcatcagcaaagccttggtcagctacaccttcatcagttacgatgaagaaacggttaacgtttggcatgtgacgaaggtagttagcagcgttatgttcgaagtaagtctttgatggtacctttacccattgcatgttatcacggcgtctagccactgttttgatgtttaacaagtccttagcaccaatgttgtgtgagaaggtattggcaccatatgaaccagtacccaaggtaagtgatggcaacatattgttgtaaaggtcaccgataccaccgagtgcagctggtgagttgactaagatacggcaagcatccatcttcatggcaaattcatcaataatcttcttgtcatttgagtgaagaccagcggtgtgacctcgaccaccatagttcaataaatcggtacaaatcttaaatgcatcgtcatggttcttagcacggtacaaagtgaagactggtgaaagcttttcagctgatagtgggaagtttctacctacgcctttatattcagcgataattactttagttgtctttggcacatccacaccacaaagcttggcaatttcataagctgacttaccagctactggaccagcaaccgtaccacgacgaggatcaataaagtgttcctcaaacttcttaatttctcctttgtttaagaagtagcagttccacttcttaaattcttctttaactttgtcataaatttcagtatcaacgacaactgaattttcagaagcacaaaccataccgttatcaaagttctttgataaaacaatgtcataaactgcacggtcaatattagcagtcttttcaatgtaagaaggaccattaccaggaccaacaccaatagctggcttgcctgatgaataagcagctttaaccatacctggaccaccagttgccaaaatagtttgaacacctgggttagtcatcaaatcggtcgttgcatcaaggcttggttcttcaatccattgaacggcatccgcaggagcacctgcagcaacagcagccgcacgaatgattttaccagtttctacacaacatttttgagcctgtgggtggaaaccaaagataatggtatttctcgtcttcaaagcaagcattgccttgaaaataacagttgaagttgggttagttactggagtaacacctgcaataacacctttaggttcagcaatcttagtcaaacctaattccttgtcttcttcaatatacgccgacggtcttttcgtgacgcaaactgttccagatattttctgaagcatacatattcttggtagttttatcttcaactacaccacgtttagtttcttcaacagccattttagctagtgggtaagcattttgttcacctgcagtagcaactgcttcacagatcttatcaacttgttcttgtgtgaagttagccatttgatctaaagcgacatgtgatttctttactaagttatcgaccatgtcgtagatttgctttttcttttcgtcctctgtaagagtctctttttgttgtgtcttagccattgtattattacctctaagatctactaattcttgtgaactaatttacaatgtcaactatagcacaataactttatttgtaaatgcatgaatttatgaaaatagtgaattaacaaagattcacatttcctcataatttcgctctaatgcaaatgaaagctattccttaattatttgtttgtgaattaacaaacttatttttaaaaaacagatttttgatatttttttaaatctaactatagagtctggtcatactaattgataatgataaaatattaagtatatgtgaaaagattgagaacattggggggcttatatgagtgagaaaaaaacacagaccgcttctggttataaacgaaccctaagcaatgcacacattcagttaattgctttaggtggaacaattgggaccggcctttttctgggggttggagacagtattcaccgcgccggtcctagcgttatcctgatatatattattgtcggtatcttcctcttcctgctaatgcgggcactgggagaactaattatgtccgacttgaacaagcacacatatattgattttattgaacaatatttgggtaaaaatattggctttatcacaggctatttgtattggttaagttggattaccttgggtatggccgaaaccacggccctaggaatttacttcaagtattggtttccaacactgaaaccttggattccaggaattattaccattgtgatcttgctgttaatcaatttaatttcagctcgtgtctttggcaacttggaattcagttttgccattatcaaaattgtcacgattattgccttcgtcatcttgatcctttacttactagtaactggtggcaaaaccagctttggtcctgttagctttgctaaccttgacgatcatggcggcttcttcgcccgtggcagtaaaggattcttacaaggatttcaaatggtaatcttcagctttattggagttgaattaattggtttaaccgcggctgaagcacaaaagccagagacaacgttgaagcgagcaatcaatcaattaccaattcgaattattttgttctatgtcatggctattttaggaattttgttagtaattccatggtccaaagttgctactaacgctagtccatttgttgaggccttaggtgctactggtattaaaaatgctagttctattattaattttgtagttatttcagccgccgtctcatcaactaacagttttttgtatagtgctggtcgattacttttctctgttacttttgacggtaaaggaaaatggaataaaacttttggacatttatcaagaaggcagcttccacaaaatgcattgactttatccgcattattgatgggatgtgcaccactaatcaccttggttattggcgatcaggcctttaattttatctcatcaacttcaactagtatgtttttaatcatctggagtttgatgattttaactcacatggcttacaggagaaaaacagcagctaatcagctaaacgattttcaaatgccaggttacccttatatcgattatgtaatcttgtcattcttcgttttaatgattatcctgctattgattttaccaagctaccgagtaccaatggtcgctgcaattgcaatctttattgttttatacatcatttccaaaatttggagtaatgaaaaagctgtttaaagcaaaaagtcgagttttttagctcgaccttttattttgcaatttttttaattattttagcaggatttccggcaactaccgtattagctggcacatctttggttacaacggcattagccgctacaacggcgtttttacctaccgtaacgccaggcaatatcgttgctttagcgccaatccaggcgttttgtttgataacaactggctttaattccagttcttttctatgctgtggatccagcttgtgattaactgaaatcaggtaggctccaggcccaatcaacacatcgttctcaattgtaatcccgcctaagtcgaccatcatcacattggcattaataaacacgcgctcgcctaatttgatgttgtgcccataatcagaataaaatggtaaccgaatctctatactagcagctattttttgaccaattatttcactaatcaattgtctaacttcacagctacaatgccgttgtgtatttaaattctgcaataatcgctgattctgttgggctagttttcgacgtaaatcgtgatcttctgtttccattattaccactcctttttcttgctctacttcagtttaaagggtaagcttatcaatgtgcaaagcttataaggtatgaagtataataacaattgtttataggtgatttaaatggaattacgtgttttaaattattttgtcgctacagcgcaagaattaaatatgacgcgagctgcacaaaaactattagtctcacaacctgctttatcgcgtcagatagcagatttagaggatgaattaggcgttaagttattcaaccgccagccgcggcacttaaccttaactcctgcaggacagtatttatatgaacaagcaaaagaaattcttactttagcttccaaaaccaagagtaacctacaatctagtgctgtcatcagtggtgacctaactattgctgccggcgaaagttttgccatgcaacgtctaatgaatatcgtcagcaacattattcgggattatcctacagttaaaattcatattctaagtggcgattatgaatttgcagaaaggcgtttagatacaggtgcagttgattttgccgtaatcattggtaatctacctttagataattatgcttctctgcagctccctgagaaggatacatggggcgttttaatgactaaggatgatcctctagcaaaaaagagtgctattacagctgaagatttagttggacgaaacgtcttaaattcacaacaagccgaaaatcgaaagtactttgattcatggttcggtaattataaagagcaaattaatatcatcggtactgttaacttgaatttcaacggtacacttttagttaaaaataaagcagctattatgctcacactcgataagctagccaatatatcagatgaatccaatctaacttttagaccaattactccaatgttaaaacagccggtaacagtaatttggaagcgagaaaccaataaatcacctgtagctgatttattcctaaatcgtttacgagcatcaattgatgacgattaacaaaaataacctagatcgaattgatctaggttattttttactttatttctttttacgactaaaacgttgcttcaatcgttgccataagcttaatgccctgcgcatatgatcagctggtacatattttcttattgctcgcaatacctttttggaatcacgtgccgcaaaaacaaatttaccatttgacttagttctgatttcaaaacgcggaatataacgtccaccaaagcggacatctgcaaccacataagttacttcattccaaggaatctgaacataatcttcaacgtttcgttcgttataaaattcaaaagctctatcgccgatcatgattttgccgtatgatgcaattcctctaaaccaggttgcatcaacagtgagatcgacttttgtattaattgacttagccatttattaaagaatgccccatacgtggaagagaacaccgacaacgaagataccgatgataatccagattggtgaaactttcttcttcaataaccacatacagaagaaagttaagagcaaaccagctaaaccaggaattaattggttcaagttgtcttgtaaagtagtaactttagtactgcttaaagctttaccgttacccatatcccattgttgaagagcggattggatacctttagcacctgatggaagcttgtcccattcgatgtaaccacccttttgaataggagtttgagaaacaattggagtgaacttgatgtttacccaacgttcaattaaggcacccaagacgaacatacccatcattgaagcaccacgggtaaccttttgaagcataccacctgacatatcactggtgatagctgaaccagccttgtaaccaaattcttgtgtgtaccataagaatgcgattctgataatattccagataacgaagaacaagataggacccattacgttacctgcaatggccattgatgcacctaatgcaccaacaattggacgaacagtgtaccagaatacagggtcaccaacaccggccaaaggtcccatcataccaaccttaacaccttggatagcgtcatcagtaacttctgcaccgttagccttatcttcttccaaagccaaggtaacaccaagaacaggtgatgctaagtatgggtgagtgttaaaaaatactaagtgtctttgtaaggcagcagataaatctttcttgtttgggtataactttctcaatgctggaatcattgaataagcgtaaccaccgttttgcattctttcatagttccatgaaccctgaaggaattgtgagtgccacataacgttaaaacggtcgcgcttggttaatttagttttcttatcagccattatataaatcctcctctatgcgttcattttaatagtcatcaatgatatcgccgagtggatcgccagtgccggcatcgccagaattattgtttccaccgttgccacccttagcttcaagagctaagtacatcaaagccattgaaaggccaatagcaccaagggcgatcaaagttaagtctttgatagcagcaagggcaaaaccaattgcgaagaatggccatacttccttacttgccatcatgttaataaccatagcgtaacctacggctacaaccatcgcaccaccgatagtcataccttcgtttaaccattgtggcatcattgcaagccaacttctaacagtacctgaagggattgctaaaagaagtgcagctgggatagcaattctcaaaccttgtaaacatacggcaatccattgccataagttgatcatacgccagttacccttcttagcttctgcgtccatgatgtgaacgatagcagttgaaatagtacgtacgatcatagttaagaacaaaccagcaacagctaatgggatagcgataccagtagcagtaccaatacccttaataccttgaccaccttcgatcaagataatagctgaagctactgatgctaaggcagcatctggtgcaacagcggcaccaatgttagcccaacctaaagcgatcatttgtaatgaaccacctaaggcaacacctaaatccaagtgaccggttactaaaccgatcaaagtacaagcaactaatggttggtggaattgccattcatccaagataccttccataccggcaagaaaggcaacaaacacaaccaaaatcatttgaatagcgttcatttatttactcctaattatttattactttttttcgtcaagtaaagtttgagccttcttcaagatagcatccatattacctggagcatctgaaggaacttttcttacatcaaacttaacgcccatcttttcaagttcacggaatgtatcaacgtctttttgattcattgataatacgttgttggcgttaacatcgccttccttatatgacattgaaccaacgttgatattcttaagatcaataccgcctttgatagccctcaatacatcttctggattttcaaacaaaagaagtgcatgagtgtttccaaatcttggatctttagcaatttcttgcatcttcttgagtggaacagtatgagccttaacacctgctggtgcagcttcacgaatcatactcttacgtaaatcatccttagctacactatctgaaacaacaattactctatcaggcttcatagctggaatccaaccagttgccacttgaccgtgaagcaaacgtgaatcaattcttgccaaaacgtacttgatatgaccatcaccaataacagtaccttctggaatgctcttcttactgcccttagcagcagctttgtcagctactggagctgcagcagccgtcttaggcattaagtcagctggcttagtcttaattccatctctaccaggttgaacaactgcagtggcgatgtgctttgcagttgcattagcatccatcattctctcagtcaatgcttgtacaaccattggtaaattcataccagcaacaattgcccatttatcatgcttttcagcaagtccatttgcttggttaaatggagtaccaccccataagtcaaccaagaacaaaacttcatcttggttatcaaatgaagcaattgctttttccattttgccacgaatgtcatctggaccttcatcaggctttaagataacatgtgcaaaattatcttgttcaccgaaaagcatttgtgcagattgtgcaataccatcggcaaagccaccatggctggctaaaacaattcctaccatgtaatttcctcctctagatcaaaaaatgaatccgcttttattatacgataaatatagactttaaaaaagtgttttttgaaaataatttcataaagtgccaatttgtttcaagcagtccaaatgccttgtctcccaagcaaagacagaaattagtctaataaaaaaagaaagcctgttttcatgatttgagtcgtttttcacaaatttggcttcctattaaaatatatgctggttggataatttcattttcataaaataacaaaaaaggaagccttccgcttccttctcccctttactccggctgtcagactcgaactgacgacatcttgattaacagtcaagcgctctaccaactgagctaagccggaatattaaaaaagagcacggcagcttcctttcctcgcaggcagttgcccaccaactactttcggcgttaagaagcttaacttctgtgttcggcatgggaacaggtgtatccttcttgctttcgccaccgtactcttttgagcttttacactcaaaactaaacataatccttctcgcaaaaaaccttccagtttgcttcgctttggtcaagtcctcgactgattagtactggtccgctccatccttcacaggacttccactcccagcctatctacctcatcgtctctgaggtgtcttactgcttacgcaaaggaaatctcatcttgaggggggcttcgcacttagatgctttcagcgcttatcccttccgcacatagctacccagcgatgctcctggcggaacaactggtacaccagcggtgcgtccatcccggtcctctcgtactaaggacagctcctctcaaatttcctacgcccacgacggatagggaccgaactgtctcacgacgttctgaacccagctcgcgtgccgctttaatgggcgaacagcccaacccttgggaccgacttcagccccaggatgcgacgagccgacatcgaggtgccaaacctccccgtcgatgtgaactcttgggggagataagcctgttatccccagggtagcttttatccgttgagtgatggcccttccatacggtaccaccagatcactaagtcctagtttcctacctgctcgagttgtctctctcgcagtcaagctcccttatacctttacactctgcgaatgatttccaaccattctgagggaacctttgagcgcctccgttacactttaggaggcgaccgccccagtcaaactgcccacctgacactgtccctggcctggcttacaggtcgaggttagagcatccttcaaacaagggtagtatcccaacattgcctccaataagactagcgtcctatcttctctggctcctacctatcctgtacatgtttaaaagatactcaatatcaagctacagtgaagctccatggggtctttccgtcctgtcgcgggtaacccgcatcttcacgggtattataatttcaccgagtctctcgttgagacagtgcccaaatcattacacctttcgtgcaggtcggaacttacccgacaaggaatttcgctaccttaggaccgttatagttacggccgccgtttactggggcttcaattcaaaccttcgcttacgctaagctctcctcttaaccttccagcaccgggcaggtgtcagcctctatacgtcatcttacgattttgcagagacctgtgtttttgataaacagttgtttgggcctattcactgcggctaaccaatctcttggctagcaccccttcttccgaagttacggggtcattttgccgagttccttaacgagagttctctcgctcaccttagtgttctccactcgactacctgtgtcggtttgcggtacgggtatgtcatctctggctagaagcttttcttggcagtgtgattaccacaccttcgctacttttaattcactcctcttcacaactcgtgttgctggttagaagcatttgactcttaaccgcacttgttgcttgaacatcgttccatcgcgatgcgtgcttcacctcctgcgtccctccttcgctcttaacgatttgacacagtacaggaatctctacctgttatccatcgactacgcctctcggccttgccttaggtcccgacttaccctgggcggacgagcctgccccaggaaaccttagtctttcggcggataggattctcacctatctttcgctactcataccggcattctcacttctaagcgctccattgatcctctcgattcaacttctccgctcttagaacgctctcctaccacgtgctctttaaaacacatccacagtttcggtactatgcttagccccggtaaattttcggcgcagcgccactcgactagtgagctattacgcactctttgaatgatggctgcttctgagccaacgtcctagttgtctacgcaactccacatccttttccacttagcatagatttggggaccttaactggtgatctgggctgtttccctttcgactacggatcttatcactcgcagtctgactcccgtgtatggatatctggaattcgtagtttatctggattcagtaacccctgacgggcccctagtccaaacagagctctacctccattatcctctccacgaggctagccctaaagctatttcggagagaaccagctatctccaagttcgtttggaatttcaccgctacccacaactcatccccgcaatttttaacttacgtgggttcggccctccagtgcgttttaccacaccttcagcctggtcatgggtaggtcacttggtttcgggtctacgtcacctaacttttcgccctattaagactcgctttcgctccggctccgtcttttctgacttaacctcgctagataacgtaactcgccggttcattctacaaaaggcacgccattgcactttaatgtgctttgactacttgtagacacacggtttcaggttctttttcactccccttccggggttcttttcacctttccctcacggtactggttcactatcggtcactaactagtatttagccttgcgagatggtcctcgcggtttcaaccgggattcctcgtgtcccggcctactcaggattctgctaggcgtgcttgagatttcgcttacggggctctcaccctctctggcttaccttcccagataattcaactatctcttacactgccacgtcgcagtcctacaaccccaaatgataaatcacttggtttgggctctttcctcttcgctcgccgctactaaggaaatcgatctttctttctcttcctgcagctacttagatgtttcagttcactgcgtcttcctttgattagctatctattcactaatcaataatgcatctctgcattgggttcccccattcggatatctccggatcactgcgtacttaccgctccccgaagcttttcgtagttcgtcacgtccttcttcggctgttagtgcctaggcattcaccgtgcgcccttttctacttgaccttactcaagaattctcttctcggtcgctctacaatctgttctctttgattgtctcggttttttgcttggattatattcagttttcaatgtactagctctttttgaggtactaccctcaaaactaaacaaagtttctcagtgtgcttccgcttgctctggatacttctcttagcattcctgctctccatatccttcgcttccttagaaaggaggtgatccagccgcaggttctcctacggctaccttgttacgacttcaccccagtcatctgccctgccttagacggctccttcccgaaggttaggccaccggctttgggcattgcagactcccatggtgtgacgggcggtgtgtacaaggcccgggaacgtattcaccgcggcgtgctgatccgcgattactagcgattccagcttcgtgcagtcgagttgcagactgcagtccgaactgagaacagctttcagagattcgcttgccttcgcaggctcgcttctcgttgtactgcccattgtagcacgtgtgtagcccaggtcataaggggcatgatgacttgacgtcatccccaccttcctccggtttgtcaccggcagtctcattagagtgcccaacttaatgctggcaactaataacaagggttgcgctcgttgcgggacttaacccaacatctcacgacacgagctgacgacagccatgcaccacctgtcttagcgtccccgaagggaactttgtatctctacaaatggcactagatgtcaagacctggtaaggttcttcgcgttgcttcgaattaaaccacatgctccaccgcttgtgcgggcccccgtcaattcctttgagtttcaaccttgcggtcgtactccccaggcggagtgcttaatgcgttagctgcagcactgagaggcggaaacctcccaacacttagcactcatcgtttacggcatggactaccagggtatctaatcctgttcgctacccatgctttcgagcctcagcgtcagttgcagaccagagagccgccttcgccactggtgttcttccatatatctacgcattccaccgctacacatggagttccactctcctcttctgcactcaagaaaaacagtttccgatgcagttcctcggttaagccgagggctttcacatcagacttattcttccgcctgcgctcgctttacgcccaataaatccggacaacgcttgccacctacgtattaccgcggctgctggcacgtagttagccgtgactttctggttgattaccgtcaaataaaggccagttactacctctatccttcttcaccaacaacagagctttacgatccgaaaaccttcttcactcacgcggcgttgctccatcagacttgcgtccattgtggaagattccctactgctgcctcccgtaggagtttgggccgtgtctcagtcccaatgtggccgatcagtctctcaactcggctatgcatcatcgccttggtaagcctttaccttaccaactagctaatgcaccgcggggccatcccatagcgacagcttacgccgccttttaaaagctgatcatgcgatctgctttcttatccggtattagcacctgtttccaagtggtatcccagactatggggcaggttccccacgtgttactcacccatccgccgctcgctttcctaacgtcattaccgaggtaaatctgttagttccgctcgctcgacttgcatgtattaggcacgccgccagcgttcgtcctgagccaggatcaaactctcattttaaaaagtttgaatgattgctcattccttatttaagatctttgtctcaaatttattgcttgcgaattgacttcgcttcttgtttgggtttttacacccgcacacttttagcgaaactttgttcagttttcaaagtactacctctgtcttgctttttttgcaaagcagacagcttttatattttatcaaaccatcatttctttgtcaagaacttttttgatttgttttttcgtcttactcaagctttttctgctttcacctgacgacatttaaatatattaccagcttatttacttctttgcaagtactttttttctttttatttgttttctttccttgcatgtctgtttttaagctctcgtcgcatctctcgaagcgactttattaatttaccttattttctccgctttggcaagtcttgctcttcgttcgcaatcttttagaaacgcttggacgcgctgtaattatttctttatttctatttcaatctacctttttctttttgcttactttatttttatccttacgcttattattcgagttttactgttttttcgaaactgtcaaatcttttgtgtaaatagttctttctcgtaaattgattttttaattatttatttaatcaaagtaggattctaaggtgtcctgaacctgaccaaagcctttatgaattcgattgaaataacggtcattgtagctcattgcctgaataccaataaaagcatcaagcgactgttcagttggaaactctgccttaggcttagctttgcgcttgatcacattgttaaatgattcaatcatgttagtcgaataaattgaagctctgatctgcttgggatagttataaaagaccagcagatctggttctatgtctttcaagcttctgataacatggctgtaaaccttgccccatttggtatagaagtcatgcaggacagctgtggcttcttctttgtttgtctgttgatgcacctgtttgaattcgttcatgatcttttcacgatcgtcgacgcgtactttagcgcagatattgcgcatgacatgaaccaaacagcgttgaaaatgagctttaggataagtcctggccaaggctgttttcatgccaacaacaccatcagaaagaaagagttcaacttgcttcaagcctctggacttcatgttttgaagcatctctgtccagacttcaatgttctcactaggagcaatgcagtagtcaatgacttccttatgtccattaggtttaatgccaatggcaatatagactgcttcacgctcaaacgtttctcggcgcaaaggaaggtatgtcgcatccaaatagacgcagaaaaacttgtcgcttagcttgcgtttgtggtaagcctcaacctttggaatcatctgcttggaaatatttgatacctgagctggactgtaatggctgccatacatcttttcaattagatcggctatttccctggtggtcacgccattggagtaaagcttgataatcatgctttccaagatatccgagtgctgcttgtagtcaggcagcgtgtgctgatgaaattgaccgttgcgatcccgaggcacttgcacttcaattgggccaaattgcgtatcaactttgcggaaataagcaccatttctagagttgccagtattccagccatttctggcatagggatcatagcccagaaaggcagtcaattcagcttctagcaagttattaacagcctgttgtagttctttgcgcaataaatcatttattttgtctggattgaatagagcttgagcaaaatctttggtaaaatcattcatgaaggagttcttctttctgtatgtgttttttttgttcaaaccaatcatacgagaaaggaactcctttttctaatgtttaaagaaataaatttaaggaatcattcatccttacacaaactattttacagtctcgttttttctcttaattttagtacaaaatttttcgaaattttttcaaaataattcaaaaaacagtgttttgcctaatttttcactcaaaaatgcaaaaaaagacgtttatcaaattgatatagtcctactttagtagacagtacaaatatataaaattgtactatctatgaaagcaggactttttgtatgtctagaaaaagtaaatttagctatgaagctaagcttaaagcagttaaacaatacataagtggcgaagcatcacctgcttcaattgcgaaagttttaggggctggcaagactacactgcgccaatgggtatatgcatttaaagatcatgggccagaagcattaagaccacataaatataatcaaagatacagtaaagattttaaactcaaatgcatagctgcctatttaaatggcgaaggctcatatgattatctaacaaataagtttggtttgcgaagtgctgcacagttaaagcagtgggttatcaagtataatagtcatcaagaactcaaggactacaatcctattctggaggcttatatgactaagagaaaaaagacaaccctagaagaacgtaaacagatagtgaaatactgcaaggatcatcaatggaactacaaggaagcagctcttaaatttggctgcagctatgcccaagtatacaactggtcaaaaaaatacagcgcaaagggaactgacggcttagcagataggcgcggtcatcgtttaaaagaagctgagctatctgaaactcaaaggctaaagcgtgaaattgaacagcttaaaaaagaaaatgatattaaagaccaagagatagccttcctaaaaaaagtgaaggaattagaaaggatgtgtttgctggacagccaaaacaaagacaaatagcacttaaacaacagcagcgaaattctctttacagtttgatcaaagaatgtcaccgagaatataagtggtcaattgaatggatgtgcaaacaagccaatattgcccggtcagcctactacaaatggcttaatcataagccaagcaaacgtgaactaagagatcaaaagattcttaagcgtattaaagaaatagctgagagcaataacagcctctttggttctcctaagatgactttggctttaaacaatgagctagcagacggtgaggccaaaatataccgtagaactgtggctcgcttgatgtgcgtgaatggcatctatactagcaaggccagatttaataagaggtatcgctatcaagctgctagaccggaagaaactgccgaaaatctattgcatagagacttcaatgccactaaacccaatgaaaaatggtgcactgacattactgaagaaaaaattcctggaacaagtcaaaagatttatctctgtactatctttgatctatatgatcgtttccctgttggctatgctttaagcaagcgcaatgatacagccctagttaacgctgctctgtcaactgcttggaaaagagagcccaatagtcatgcaatgcttcatagtgatcgaggatttcaatttaccaggatgccttttaagcatgagctagaagaacatggcatgccacaatcaatgtctagaattggccgctgtattgataatggcccaatggaaggctggcaaggtttaattaaagaaatgcgagaagttctttatccgaaggcaaatagctatgaagagatggaaaaagcctttaaagcaagtattgaatactatacgcgtggtgctagttaaatcgttctagacaatatgtcatattataagctaaaatagctatttctagccgttgttgaaaacctactaagctcctggctcgattattctcagcattgtaatagctaagcaaagaaaagtcgctttcgattgttcttctaattgccattaactgatgatcattatgctttttagcacccctcatgtttttacgatatggtgtccaaagcacgtatcccatacgctttagcttggctgctaagtcttttcctaaatagccttcatctcctaaaagataatggttaattggatgagcattgatcatcaattctaccgtctcttttgcatcatgtaccgacgccttagtaactgcgtagtcaagcagatagccatcatcactcactattgcgtggactttgaagccataatagtagatttttttcgtcgctttataaccaatatcggctatgccacggaagatcttaacgtgataattgcgaacaggctgacaaactggaatcggaaaactgtcgataatcaataattctccacctacctttacttcctgattccaaccctgacggatacaacgaattagaggcaagagcattcgagctcgacggttaaaacgagaatgagataagccaacgaagaatttacagaatcttcgttgagattcaattccaatttcagtttgccaaatgagcatcgctaagatagaactatcaggaagcttggtctgatcaacatttttacgatgtttaagtccatcaggcgcataaagcttatacagcgagcgacaaatcacatttaaccgattaaaactaacttgtaaatggtgagaaaaacgattaagcttgagatagttcaattagatcagactcttttctatttaaattacttacaacttgagtctagtctaattggacttttttattaactaaaacgatttaactagcaccacgcgtaatactatattaattatgatcctcaggagcgcttcaatggcaagagcgcaggtcaggttagaaaagaagctaagaataatccagagaatataatttcatatccaataaaacaagataaaagatataaagacttttggaaaaagattgatgaaaagaaaaatcagctcgcacaatagcgaactgattaatcaaattaatttatatatttaagctgtctacttgacacggtacggatcaaatataatcattcgataaacgtctcattttatatctttagatgatcaatctttagtgtctattcatcttttttcttacgtttttcaacgccaagtaaactaatccaacctaaaccagcgagtaatgtaccaatcaaacctagtgtgtgtttgtgttcactaccagtttgaggcaataaatcttgcacggacttcggttttgcatttaatttgttagctaattgctttctttctgttttccctattgtcctcttgccagattcaatgtctgctgccttaactgggccgttagcgcgtttctttcgacctgtaggcataccttcatgcttaggattgttattagagtcatagcccttcttatttgctttagaatgattatgcttcttttcactttccttatttggctttgccggtttatctggcttcggctctggatttggttttggcttcggttgaggttctggttccggagtaggtacttcatcttgcttgtaagtaattttaatattactgtcagccgtatctactgaaaccttttccgctgccaccttactttgtgaagcagtgtagccactaaatgttggagcagtatatgcatcccactgagtattaccatctaccctccactcactgtatgtaactttgccagtaactttatcaaacgttactttttgcgtggtaatcagcttaccacctgaaggcgtaatgactgtaattattctagttggagtcttagtaaaagtatccaagtgatcatagttcttacttggatcaccttgcactgggcctgttggaacatcccttggtggagtttctggagtaacgataatggtgtcgtgttcaacccttacagttacagttggaatgccatcagcagttgcaactactgtcttagaaatatcctgtcctgaaacaatcttccatcctgctagagcttgtggatttacatctactgtttcactggtcttgccactaagcggagtttgccctacttctttgccatcactatcaacgtaagaaatcttccccgtttgagtgttgacagtataagtagcagtgacttcactattggcaaccagctttccagtaaccaagtcatatacggcagtccgcgtaaattcaacggtctgtttcttttgatcttctgaaatctgagctagttggcaattcttgatctggtgctaactcgtagttctctggaagcttcaaatcaaggttatcaacagttgagccagcaacgccagacttagtaattgtctgaccaacttgcttgttaccttcttgagtatcttcaaattcaatagttaaagttgcatccaaagtaaacttagcctttgaagaaatattcagcttgtagtttggatttgctttttcaagggcagtaatactttctggagttaagttaattacataaacgccagattcagctggaattccatttgcaaattcataagtcaaacctgccggaactgtaatagcagttggaacattaactttaaagtttgttccatcaattactggtacagtgctttcttgactaccagaaatcgttacattttcttcagctggactaattacataagtgaattgaccactttcagaaactgcatagttaggattatcatcttgcaatttcttcaatcccttagcagttaaggcaatgtagtaagtaccggcatttgttggcgcagaaattggcttaccattggcatcgacccattcataatcaccagctgctaggttagcagtattcaacatttcaccgcttactaaaccagttggagtgaatacaccgaagttggtagcttgagtgttaatcgttgcaggttgaccatcgtacgtcttgccatctgcgcccttactattaccgtcaagaactacattaagatccttttgtttaattgtgtaagtggcagagcctagcaggtcttcagcatccaaggtgacatttccttgaccagcgtattggttaagggctttttgcaagttaacaataccattggcactcagcttaatcgtgtaagtaccatcattaactggtgcgctgccagcattccaaatataatcaccgtcttgcagagcatacgtactttcggtagttgaacctgggaaagtaaagtgaactaaaatttgaccattgctgttaacttgtgcagttgttacagctgtaccatcaaatgtcttttggttagagccattaagttttgcgtcagcagtggctgcagtaactatgtagttagctgttgtcttaaatgtccacttgtagttagcaccattattaccagttagttgcttaagcttttcttgaccagcctgtgacaatttaacttggtaagtaccgacattcgttgcattaccaacaatttgcaaatcgtcagcagttaacttaagtgtctgagcttcaccatcagcggagtaaaccgtcgcatcgtaggttacgttgtacttattcaagttaagtccacttggtaaggtttgcttagcatcataagtcttgctgtcaccactattcagggtaacagtagcttcgccctggttaatgtacccttagtagttacatcagctgctacttgtgggtatgcgtagttagtacccaaagctttttcaatgttagccaacccttgcgcagataattccacgtggtattcaccgacattgcctgggggttgatcaaagatcaagtcaccatctttagcagtgtagcttaaattagtactattagtactatttttaccatacgtatatttacaacaacataatctttgcctggatcaggaacattaacttgccaagtttgtccagcttctttaggtagactccatgaaccagaaatcactttaaatcctggcgttgttgaatcacctgctgtttgatcccattgccaattaccataagtaatcgtgttattagcaacatttaaactaccagtctgggcatagaatacctgtatttgtgaatcaggtgcaaattgttgaccatttttgtcaccaccagcaattacatatttagccgttactgttctcgcttgctgttttactggaatatacaaaacagtgtgaactggacgggcttcataaactgaggcgttctcagtatatgctagagactccttaccctcactagatgtatcttccttattccaagttgggtaaacaaattggtttgctgacctggatcgccgctcttattgtaagcactataagaaacttccttattattttgagtagaaacatctttagtatcttctagactagtagcttttttatcttctgcctgtttagttgaattctgctcggttgaatttttgctagtcaaaggatcggtaccgctaacttctttttgagcagtagtatcgttatcattcttaccagctgtcgtagtctgatcatttccagtatctgtggtagtcttcttagccgactcaacctcttctgtttctactggatccgtagtatccgcatgaaccgtttgacttgtattcatcgtccaaagcaaagttgaaagcaaaacggaacaaactccaatgttcaattttctaatactaaagcgctgcttgccttcaaagtcatttttatttagtctttctattacgcggttttattctattcatctattttaacgcctaacataaatcacaacaaaaagcaggcttaaattatatgcaaaaaaatcgttattttaagttgtcagtcacaacaactaaaataacgattttgcttttttaatctttaattacttaaattaaacctgattccttagtaatcttcttcataccattcatgtaaggaacaagtacatcaggaacagttactgaaccatcttcgttttggtaattttccaaaatagcagctacacaacgaccaacagccaaacctgagccatttaaagtgtgtgccaagtgaagcttgccgtcttcatcacggtaacgaatttgtgcacggcgagcttggaagtcagtacagtttgaacaacttgagatttcacggtacttgtcttgtgcaggcatccaaacttcaaggtcgtaagtcttagcactagtaaaacttgcatccccagttgaaagagcaactacgtgatatggcaagcccaacttttgcaataagtgttccgcattatgagttaacttctcgagttcatcccatgattcgtcaggcttacataccttaaccatctcaaccttacggaattcgtgcattctgatcaaaccacgagtgtcccgtcctgctgaacctgcttcacttctgaatgctggtgacaatgcagtaacattgattggcaacttgttttcatgaataatttcatttctgaagtagtttaccaatggaacttcagcagttgggatcaaagttaagtcacgtggcttatctggatcgtcattatcaacgatggtataaacatcttcgtggaacttagggaattgaccagttccttgcattgatgcatcgtttaccaagtatggtgggataatttcggtataaccttccttagtgttttcatcaaggaagaagttgaagacagcacgttccaaaagcgcaccagcaccgatgtagtaaacaaaacgtgcacctgaaacctttgaagcacggtcccagtctaagatgccaaggtcagtaccaatatcccagtgagcctttggcttaaagttaaattcagtagttgggtgccacttacgaacttcttcgttgtagctatcgtccggaccaattgggtctgaatcagctgggaagttaggcaatctaagcaagatgtagttttgcttttcagttaattccgcaacttccttatctaagtctttgatttccttacctacttcacgcatagcagcaattgcatcgctagcatcttctttgttacgctttttttctgcaatttgcttagaaacgtcgttacgcttagcctttaattgttcactcttagtcaaatccttacgacgcttagtgtcgatttcaactaattcatccaattcttctggcttaatgccacgcgtagccaatttcttctttgaccagtcaagattctcacgaatcaccttaatatcaagcatataaaacctccatgatatgcataaaaaaagagccgacttatccctacacttgggacgaatcggctcttacacggtttcgcggtaccacccagcttcagtctatctagactgcacctctttaccagacgagtaacgacgtcaaaccgtgcaactattaattgcccacattattgaaatctggaagcgactatgcattcactcgcaccaaccgtgaactctctgaagcagtcttaggatttcgtgtttgcatttattttaagccattcttcttttttgagcaaataatatttttctttaaacgaaaaaagtgcactaacttgtgtgtaatcgacagtataaacatactgaaatcctagtgttttaagcaatttctgtgatttttcattatcggcaaaagttccagcccagacttctacttgctttttctttttaaaagcataggtcaaaatcaatcgtaaagcttcagtcatatagccgtgaccttcaaacgactgatctagcaaaaagccaacttctttagtctttaataggccactcttttcatctaagccgcgttcatacaattcaaccagaccgatcacttcattgttcttgcgcaagcaaacgacataactttcaggacgcgacatatattgcttcacgccattaaccgcctcagtcagattgcggtattcctcaaagccagccatcttgtggtagcggggattgccaccccacttcagtaattgctgcgcgtccctttcttcaaaaggtctcaaatatattctcttagattcaagcattagttacccatcagcttcaagagccactttgcaccaaactgtaggcctatactataggccgcaattgtccatggcttacacaaaataataatccaaaaataagtccaaaacttcattttagtcaatcctgctagcaggcaaagcacgtcatcgggagctgctggggcgagaatacataatgcaaagaaccaattaaatttattctgattctctgtccacttcatatatttatcaagcgtttcttccgaaacaatatgcaaaataaagggccggccgtagtgtctagctaaaaagaagttgataattgagccaatacaaatccccacgtagttataaataaacccagcaactgggccaaagaagaccacgcctcctaataaagacacgcccccaggaataatcggaataactacctgaacaatttgaatcaacacgaaaataatcggaccaacaatttgtttattagccagataagcccgcattttagcttgatcggtaaagatccccaagcggtaccaataaatcaccagcaacacgattgcgactccacaaactatagttgcaatattgattaatttacgactagccttagtcgatagatgcattttctcgccttccttcatcgcctagtagttcaattttaacaaaaatccagcccagataccgtaaacatgcaaatctaaaaaaagttttattattttagctactttgggcagatactatataataaagttaataagttattagaaaggtgaaactgtcaaatcttttgtgtaaatagttctttctcgcaaattgattttttaattatttattcaaaataagattctaaggtatcctgaacctgaccaaagcctttatgaattcggttgaaatagcggtcattgtagctcattgcctggatgccaataaatgcatcaagcgactgttcagttggaaattctgccttaggcttagctttacgcttgatgacgttgttaaaggattcaatcatattggttgaataaattgaagctctgatttgtttgggataattgtagaagaccagcagatcgggctcaatttccttcaaacctttgatgacattgctataagctttattccatctggcatagaatttgtgcaagacagctgcagcttctttttggcttgtctgttgatgtatctgcttgaattcgttcatgatcttttcgcggtcatccacccggactttagcacagatattgcgcatgacatgaaccaggcagcgttgaaaatgagctttaggataagtcctggccaaggctgttttcatgccaacaacaccatcagaaagaaagagttcaacttgcttcaagcctctggacttcatgttttgaagcatctctgtccagacttcaatgttctcactaggagcaatgcagtagtcaatgacttccttatgtccattaggtttaatgccaatggcaatatatactgcttcacgctcaaacgtttctcggcgcaaaggaaggtatgtcgcatccaaatagacacagaaaaacttgtcgcttagcttgcgcttgtgataagcctcaaccttggggagcatctgcttggaaatatttgatacttgagctggactataatgactgccatacattttctcaatcaagtcagcgatttctctggtagttacgcctttggagtagagcttgataatcgtgctttccaaaacatcagagtgctgcttgtagtcaggcagcgtgtgctgatgaaactgaccgttgcggtctcgaggcacttgcacttcaattggtccaaactgggtatcaaccttgcggaaataagcaccatttctagaattgccagtattccagccatttctggcatagggatcatagcctagaaaggcagtcaactcagcttctagcaagttattaacagcctgttgtagctctttgcgcaataaatcatttattttgtctggattgaatagagcttgagcaaaatctttggtaaaatcattcatgaaggagttcttctttctgtatgtgtttttttgttcaaaccaatcatacaagaaaggaactcctttttctaatgtttaaagaaataaatttaaggaatcattcatccttacacaaactattttacagtctcagaaaggtaggcatcttatggttgtaattaagaatgatattgtttatgacaagactaaagaattaaaaacggatatttactatcctaatgatacatcttctaataccaagattttaatcttctggcatggcggtggctggtttagaggtgataaagacagcgtcaaaaatctaggtattcgctttgctaatgcgggctttatgaccttcatccccgactactccttagcacctaaataccactttcctgctgctcatgaagatgcattgcactttgtcgactggctgttgaattctgaatacactgatcaagacgatatcaaaaacattgttcaaattggagccagcgttggcggtgaaatggcaattgaggttgctgggaaatacggtttccctactgtcacctggtctgctccagttgaatattcaaactggattaaagatcatcaagatactaaagcatccccagatgccgctaacgattttggcattaccgatcctgaaaagatcagacaatctttctacaagcacttcacattaacctacacaggtactgaagatgaggctgtattacaaaaattagacgctaagtcatttgactatagccatctcaagcaattaatgatgattaattccgcagatgagttgacaccactagctacagtattggattttgttaagttcttagctgacaaaaacttaggcgtacagctcctcgtaattcctggtcacggtcacgccatggcctatggtcccgattatgtagacgaatcgctcgattttttatatcaaactattaagagacaaaattaagtatgattaacatccaaaaattcgttcaagtcagaaaaaaactaaagttatcacaaactgagctttgccaaggcatttgtacccagtcgaccttaagtaagtttgaaaataatgggcaagtgccttcatttaaaattctcaagcagctttgtgaacggatggatattgatgttagcgatattatggacagcagtgagcacaaatatatcgcgcatatcctgtttgaagcggattttgcttttatcaattttgattacagtaaaatttttactttactttcacaaatcaaccccgaagtagacctaaaacgccaaacaaatcggattcattatcactatttgcgcggacaatatgctctaagaagtgatcgcaatcaaatgcaatgtcattaagttaagacattgacaattaatattagacttttaaagcactgatttaacatttaattggttaaattggtgcttttttcgtacaacaaataaggcatagcacagattctgcttttttaagctacgcgatataaataatatacagctgatttgggcttaatatttctcttgtccttgcggcctggtctaattggaatggtataatagctgatctgaataaggatccgttcaaaatcttgcgttaaagaagaagccaaatacatgctctgaataatcaagcatgattgcttgaaattgatggcatattgatacttgcaatgcttttgcggaatataggcctgtgcatcaatttgactgattgcattaaacataatcatatgggcataaatttccatttcaataaatttatcttgtttggaatggaactgtacactgcctaaagaatacttcaatttcttgaaggaggtctcaataccccaacgcagatgataaagctctttaattctttttagcggataattttttcgatcaagattggttagcacaacttcccattcttctttgcctgatttggcatcattaattctaaatttgcaggctcgaaattttattgtgcataactcgccaaaatcccagcttagatcctgggtatttttagagcgatacttaatatattggcgataatgatgctggacatggtgaatattctcactggctttatgcgtgatgtagtaatagttagaagtagttaccaggcaggaaatctcacgatcacattcttgatcaggcaatgtcgttatttctttaactccgccttgtccagccttagttcgtattatgtaatgacagttaggcaggcgattgcagttttcaatcatattgaaactagtgtagccacgatccattgttacaatatatggaccacaattcaaagctttaagcatttgaacagccgctttgcgttcatccatttctgatttaggctgaaaaatacaatcctggtaggtattattcaatagatcatataaggcattaacgtgaatttgacaatagggtttctttttatgagaagaagcttgtacaatgttattcgatttcggattccagatttgattaaagtcagagccatcaatggcaaacaaacggtagtgatgatcaaaaagttgaatattaaatagattttgattaaaaacagtcagaatatgtttaaaacaagcaggagaaagctggcttttgcgttgaacataggcagaagtactaactactttatcgttctttttagttgcatcttcgccaaaagctctaaagagttcactgtttaaattctgaccttgcatgttaattgtagttttaaggactgtcgctgcatctaaagtgcgtttcctggtaaaagcatgaggattattaataaaatcgtgaatatgatccccagtattattgataatttgatcaagacgttctagaatattcttatgaagggctttcataattaacaccatctttctggcaataattttgaaggtttaaaatatataatatataagataggcgaaaaggctggtcttttcgcctttattttatacaaaaaaagagatcgaatccaaatgattcgatctctaaaaaagcacccttaattgtcaatgtcttaacttaatgacattgcaatcaaatgagtgcgctcttttatttcaacaatatcttgaccacccaggaattgcctgaaaatgatatttaccgcttgttggcattaaatggttgtagtcaaatctatgctaaacaaggtgaaacagagaaagccgagcactattatagtcaagtattaaagaacattatggacgtcaagatcgataatattttgactacaatgcatgccttaagtattttatgtgatgccggtgaattctatggcgaacgaaaaatgtatcgtgagtctaatgcattattgcgctatgcctataagattggcgctgagaagcacgtgattttttacatggcacgcatcctattgcggcaaggcatgaatgatattgatcagtcaaaaaagaaagcaattgctatccaacatttgcacgatgcctgtgcttttgcccgaatcaaccgcaacacgattacgctaaatcaggctaaaaaattactaaaaaaattaaatgactaagatccaatttgaaatatagtaataagagtttgttcatttgattttgcaaaaatgataaaattagtataaatgaacgctgtttaggagtttcagataggttgactttggaacgaattatcaagtttatgtttgacagtattggtagctatttatccattcgaaaaattgccaatacgttaacttcaatgggacataaaatcacaccaaatacggtagaacggtatattaatgcgttactcgacagtttgattatctatgacgtttcacgattcgatattcatggaaaagagcagctaggttcgctaaaaaaaatattacattacgcgtggtgctagttaaatcgttctagacaataagccaaattataagctaaaattgcaatttccaaccggctttgaaagcctatcagactacgtgctcgattgttctcggcattgtaataggtcagaagcgaaaagtcgctttcaattgttctgcgaatagccatcaattgatgatcattgtgctttttagctcctgtcatatttttacgatatggtgtccaaagttcgtaacccatttgttttagctgttgatgcagttctttgcctaaatagccttcgtcgccaagaagatagtaattagatggatgggtattttctatcagttcaactgtctccctggcatcatgaactgatgcctttgttacgacataatcaagaatgtaaccgtcatcgctaacaatggcatgaactttgaaaccatagaagtaaattttcttggtggccttataaccaatgttggcataaccgcgaaaaattttagcacgatagtttcgaattggttggcaaacaggtaccggaaagctgtcaatgatcaagaactgtccattcaggtcaacctttttattcatttcttgccgtatctgataaatcaattgcaatagctgacgtgaacgccgattaaaacgtgagtgtgataaacaattgaaacattcacagaatcttctttgtgattcaattcctgtcttagcttgccagataagtaaagccaaaatcagactgtccgtagttttaatttgatcaatatttcgccgatgagtaaactcagccggtgcatacaaacgataccagtgccgacaaattatcactaaatctttaaaactaacttgtaaatggtggctaaaacgcttaagcttaaggcagttcaatcagatcagactcttttctattattactatttacaagtcgagtctaacaagattggacttttttattaactaaaacgatttaactagcaccacgcgtattacattgttgatactgggcttagatatcatttgttggcaaatcaaaaaaagatcgtggacatataattgaaaatattgtttatcttgagttgcttcgtcgtggatataacgttactgtaggtagcatccctaatggtgaaattgattttgtcgcaagaaagaataacgaaattttttattatcaagtgtccgaaacagtgctagatgaaaagaccttagagcgcgaattgaaaccgtttaacaagattaatgatcattatccaaaatttctattaacaatgaatgaatttggcaaaaatgataattttaacggaataaagcaacttaatattttagattggttattagaataattaagctaagattaagaataataatttaaaaaaagaattcgaaaaatccccatttgtagtgaaaatgcctacaaaatggggatttttttagataatcttgtaaccagtaactggcttagcaggtactgtattgaaatcaaagctagcaagtttgtccagttcagtattaccatcaataattgtagtaacaccttgagcaatcatcaggttcattactttatccttgtctagatccttagtgaaggttaccaagactacaggcttatgcaaagcacgcatgaaaccaatttcaaaagcactaccatcatctacattgtccatgtcatacaagaagacgccacatgtagagttaactagaccttccaggtcattgttataagtggcaaggcgccaagtcatgctgcgaatgccaccaatttcaggattcttttcatccggatcaacaaaattttgatcaaatggaaaatgcactctgaccactgtcggattttcttctaacaaggcacgagccttatcaactcgagcacgttgatcatcattgtaaaatggagtgcctaaataaaccttagcagttgaaacttgtttgttcatgcttttgtcccttcaatgtttaaaacttacaaaataaaattatttttcattttagcatgacttttttacaactaaaagcacaaatagctgtgttttcattgtaaacgctttataatagaaacataacttattaaagctaaacataaaacttattggaggaattattttgtctagatatcaatcaattaatccatatactaacgaagaatttgcaagctatgacaattctactgccgcacaaattgacgatgccattaacttagcacacgctttatataaaaaatggcgtcatgaaaatcctgagacccgcagtcgtcaattacacaagatagcagatgctttgcgcgagcatgaagatgacttagccaaaatgatgaccctggaaatgggaaagcttttgcgcgaatcaagagaagaagttgaattatgtgcttcaatttgtgattactatgccaaaaacggggtcaaaatgttggctcctactccaatcgaatcagacttaggcaatgcctattatttgaagcaatcaactggcgttattatggcttgtgaaccatggaatttcccactttatcaagttattcgggtcttcgctcctaactttatcgtgggcaacccaatcttactgaaacacgcccacaatgttccaggttctgctgctttaaccgctaaaatcatcagacgtgctggtgctcctgaaggcagcttaattaacctttatccaacctatgatcaattaagcgatattattgccgatcctagagttcaaggcgttgcattaactggttcagaacgtggcggttcagctgttgccgaagctgctggtaaaaatttaaagaaatcaaccatggagcttggcggcaatgacgcatttatcgttttagatgatgcagatccgcaagtattgcgtaacgttttaggcgatgctagaacttataacgatggccaggtatgtacttcatccaagagaattattgttgaaaaatctcattatgaggaagtgctacatacgcttaaaaacgtcttttctaatcttcaagcgggtgacccacttgaagccggtactaccttgccaccaatgaattccgaacgtgccaaggaaaaattagaagctcaggttaaaaaggccgttgacgcaggagccgagattttttaccaatatccagagattgattctaaaggtgccttcttcagacctgtaattttgactaacatcgacaaagaaaatcctatttatgatgaagaattatttggccctgtagcagaagtctttgtagttgacgatgatgacgatgccattcagcttgcaaatgattctagctatggcttaggttcatctgttatctctaacgatatcaaacgtgctcaaaacgtggccgctcaaattgaaactggtatgactgtcatcaatggccgctggattacctctggtgaattgccatttggtggcgtgaagaagtctggctacggtcgtgaattaagtgacttaggcatgatggcctttgttaacgaacacttagtaattgatgttactaagaataatcaatagtaatttttcgataaaagaaacatactaacctagtgttggatcatgaatcgacggattcacgatctggcactttttattttgtctaaaatagaaagtgaagataaagcaaatcaagtcttcagctttttagacacttgatgtcgtaaaagaaacggactgctttaccacctattcttaagtctcttcgaagtctgtgggcacttagatgccgtgtttagaaaattagaattaataggttgataaagaggtttatcttcacagcggaggttatattatggaatcacaaattattttcggtattgatgttagcagtaaatcttccacagtttgtgtggttaatgaccggatcaaacaaggcgaatcttttagaatctctaatgattcctttggctatcaaaaactttatgagcaactgaaccaatatttgataactcctttagttgttttcgaagctactggtgtttattctctaagcctgcaagctttcttagaggattatcatattaagtatttgaagcttaatccgcttaaagcgaaaaagctaatggacaataatttacgccataataaaactgataaggtagatgcttatcgcctggctttaattcaatttaatgccccgcaaaagctgcgtgatccacagcccagagagtatcatgaacttcagaatgccagtcgctattatgaagaacttactaggagtatagttactactaaaaatcaattgcaccgcaacctccaatccactttcccacaaattgaagaaatactgtctcatccatctggcagaatttattgggcgcttgttagtcttttcccacatgctggatatgttctagaaaagaatgagacacaggtaactcaaatgcttaattctatttctggaataggacaacaaagggcacggtacttaaccacaagattatacgcttttgctagagaagcttatccttatgattccaaagatagtattatcgttagagctattcaaaggaacatttctaatttgttttcactccagcaagaacgcgactatgtaattaactacatggaaaagctggctaaagcagtaaacgctcgtgctttatccatctatttgagtatcccaggggttgctagaattacagcagtgagattagtagcagagctcggtgatctaagacggtttagcacttcagctcaaattgatgcgtttgttggcattgatccaggaaggtaccaatctggtgaaaaagacagttctcttggcattaccaagcatggcaatcatattgccagaaaaatactttatcgagttattattcaaatggagacggtaaaggctacgcagccttgccatataactgattattatgacaagaaaaaacgatcttcaaatagccaaggctataagaaaatcgccattgcatcagtccataaactgatacgcacaatgtttgctcttatcaaacatgatcaattatatgattacaacatagccaccaaaaataaaagactttagctgaaatcaaataatcaacttaagtataagcaacctatggaaaaactacaagtattcataggcttatttgtggtactttcgctttttcttaaatttaaactcttatttgctttaaccttattcgcatcattaaaacaagtaaatttattttcttaaatcattgataatacttgactttgggtagaaaatacgctggcaacttaaccagcgtatttcttttacttattattaattctatttctttttaaaaagattatatccagccaaaatcgtggtcaacacgctagccaaaatcataaagtaagctgaagctccgagagaaactgcatatgacataagttgactcgtcaattgagccagcaccccagttgaagcatgtgccgcgcttgatatttgaaaaatcatataaatcaaaaagattgattcaatcaaagaaaggaagaaggccaaagtctgactagccttagtatttttcaaaatattataaataatgaaaattgggaacaagaatagtagcaaccagacaatgtaaagaataagtgcataccatgatgtcacgccagatgaaagcaagcgccctgctaaaccgaacagtacattggaaatagacattctctgcgtgtaagccgaggcacccgagtcggtaaagagaacgattagactaactaaagccgtaaaaataactgaaatctgcacataattaaagtgatgtttgcgaacattttttatttcacgtacatgattttcaatccgaggatatttttgcacaaattctcggtttttcgctttgactttactttcacgtgcatccacccggttaaagacatcggaaccaattcggtcaatcttttgcgttaatcgcttatcaaccgtatactgctcgatcttatctttacgatcacacacaatataaagccaaaccattagggctaaaaagccagtccaccctgccgctctagaaaaactcattaggattaaaagtaagactcccaataagaagactaaggtcgcatttttcctaacccacgcaatcattctttggacagtggtgttttgcttttcaggaataaattcttcccgataggctgcacggctgataatcttttcgccttcatctggttcttcaaactttgctttttggtgctgatctgtgaaaaagtcgtctcgatatttttttagattgaagccacagtttggacaaatatcatctgtttcactaattttatggccacaatttggacaagtagtcatataaaaattcccttctttttcaatctgttagtcattattataacatgtatcagaatttgaagatcaaaacaaaaaaagaccgaatcattgcgattcggtcgaaaaaattatttactaactatttttcaacattaattggtaaaacattatcaatataaggtgaatgtccatcagcaatcaaatctgatatctttctcaacattggaaattgtatgttcctagtatcatttccaaacttttgatatgcttctggagttgcatctttatgtaataattcatatcctaatcttttgtagaaattaacactttcgtccacagattcaagataaatcagctgaacacctgtatacaatgcaatcaccatgcacatggaaaagaattccatcattagtgctctaccaattcctgttccttggtattccttgtcaattgcaaaataagcaaggtttatatatggtgtatcaactttataagtaccatcatccttcttaacattctgtgttaataaccctactgttgacgagaaaaaaccaactatctgatttttgataggatccattaatacaaaagtctttaatttctgtgtactttcgaacttcggacattccttacgaaaaaaattatctataccacgattagtggaatcaaaatgtagggctaactcttcaaaatgtggacacgtacttaacgggcataatttaaatgctctactttgattcatgcttttccttcccacgttgaattactatcccatcagcttcaacttctttttgcaacttttttatagacacacgtggtactggattggctattttgtttttgaattctttaaatgctttttcatttttaaatgttatctcagcatttctaacaatacctaccataattaccaactccttttagtgtacctattaatattatacaatcataatctgttttactattagtttcaagatttattttaacaaaaaaagaccgaatcattgcgattcggtcgaaaaactatttattaattatttttcttatttcttcttttggcgaacttattaaggtcaattccctcatatgtcaacttagtagctgctgacatagtaattggcaaaatgaagaccaagatgagcaaaccaatatccacggctaaggcaacttcaatcaaagttggaatacctgatggaatcaaggctgcaaaagtaccacccaagataattgcggctgatataacaaccgtaccaatgatagcacatgccttcaagattcttgaacttggagtagtgtatccttcagactcaagttcacgataacgagtcatcaggaagatactgtagtcaacacccaaagcgatcaacataatgaagctgaagaatggtgtgttccaagtaagcattgacttaccaagaactgctttaacaatccattgattgattgaaagtgagcagagataagcaataagtaaagtaccaagaatgtagactggttgcaataatgaacgagttacgaacatcaaggcaatgccgataccgattaacatgatggcagcagttctaaggaagtcgccactggcaactgtcttagtatcttcaatcttggaactttgaccacccatagctaccttagcattcttcaaagcagtaccttggaatgacttcttagccatagcacttaattcttgtgacttcttagtagcttcggttgcacttgggtttgaatcaaagacaacaataatttgagctgacttcttgtctgggctgaggtaaacatccattgacttcttgaacatatcgttcttcaagaattccttagggatgtagaaagtatcagcggcagctgatgaacctaaacctctgaggtaggtttcaccttgacctaaaccactattaacagtgtcaatacctgaagtcaattgtggaactttgcttgccaacttaccagcgccagcactgagttgtccagcacctgtgttaagttgactgatacctgaaataagttgtggagcttgaccagctaattggccgataccactgttaagctgaccggcaccatttgcaagtgtgccaagacctgtgttcaattgacccgcgccattgttaagtcggtttacacccgcaccaagacgactagcgcctgacgaaagtgaacctaagccactgcttaattgaccagcacctgaattaagtctttgtgcgcctgccacaccttgtgaagcagctgattgaacttgcgtcaagcctgagcttaattggttcaaagcagtagctgcacctggaagtgccttgttagaagcttgagctaatttagctacttgagtctggagagttgataattgttgaagtgatgaagttaaagcacctaattgtgagctaagtccagaaacatctatagcagcattacccgtttgagtatcagcttgtgtattactaaatgccttattaatagctgcttcagccttttgctggtcttcagtagttaagccagcactgccaatggcttgaagtgctgctcgttttgcttgtgcctgagcaccagcagctttttgactagctgctgacaattgtgctgcttgttcttgtaacttcttcaaacttgcagttaatcgtccaacttgtgaagtatctaatccactaacagcttgattcaattgttgaataccactgttaatttgtggcaaagcagtttgaagttgagcgagttgttgtttgtttgaaccactcaattgagttgaaagttgtgaactcaattgttgtaattggttaaccatttgttgggtaccactttgcaagctgctagcaccattctttaagcgatttgcaccgctaactaattggcttgcaccactttgaagtgcgtgagtaccacttgccaaacgaccagcacctgtttgtaaacgtactgcaccactttgtaattggcttgcaccattttgcaaacgactagtaccaccaactaattgttgggcaccactttgaagacgacccgtaccatcttgaagttgatctgcaccatccttcaaactattggcaccattagcaaccttgttggcacccttactcaatttgcccaaacctgaacgagcttgatcaacaccgtcgttaaccgtgtttaattgattgttgacataaagcatatcaattggttcgccgtaaggttctgtaacagatgtcgcaaatgaaacatcttttgaagcttgaagttgcttagtcacttgatcaattaacttcaaattttcttcattgtctaatctatgcttgctttgaatgtacaagtatgatggttcagccatccctttagagaagtgcttttgtactatcaacaaaccttgcttagatggaactgaatctgcaatttcatcagtgtcatcgtagttcaagtgacctgagtacattaacatgaatggcacaacaacaactgctaacacaaccaagtaaataattggatgcttcaatatggcagatgaaataccatgccataacttgtcatcactttcaccagtaaatttcttaactggccagaacattttcttaccaagcgtagccataaagaatgggttgagtgttaaaagcactaccaataaaacagcaacgccgaccgcaacaccaacagctgattggtaaacggagaatttagctaaacttaaagcagtaaaaccaattaagatggatgaacctgagtaaagaattgttttaccagcattgcgcaaagcgtcatgcatggccttatacttgtccatcccttttcctagattttctttaaacttgtcatacagcaaaatgttgtagtcggtaccgataccgaagagcacgataaccataaacacttgcgtaaagtttgaaaatgggaaattggcgcttttaactaaattagtaacaattgagaaggaagtaaggaatgaaacaccaactgtcaacaatgaaataagtggaacaattggtgacttaaatacgataaccaaaacaataaagataaagacaactgtaatggcttcagtcttcttaattccctcttgaattgaagcggagaaggcgtgctgcaagacatccgcacccgttacataagtacgaagcccttgcgttttcgcggccttgttcatttcgttataaactttttcaatcgtaccatgactcttagccacattaaattgtgctacccaagtcgtgccatcttttgattgaagtttctttcttgtagcaatattggaatctggaagtaatgaatccttgattccgtacttgcttttatcattagtgaacttatcaagcgtattattaatagcctgtttatcggcatcagttagcttgccactctttttgttaaaaacaagtgctactgcataagtgtttttcttgttcgagccccaattgttctctattgactgtgccacattgctttgcacattacttggcaacgtaatgttagagtgatcattagtcagctgcgtaatgttaggcaaagcaacaacggaaataatcaatattaaaatccacgcaatcagttcaaaaacatggttcttcagaaatttctgcactttcctatttcctccctatttgttgtaaatcaggtactggttctacaagccgtaaaatcatttcatgataattacgattagattcatcttctgtttcatctccaaaagacttcgatttatccaaaaaaacgtaccctaatacggcgccaattaaagcatgaaatgaaatgacactttcttttttaaaattaagtctttcacccattttaattaaatccaagatttcttgattgatggccgcatcctttggatattcgttcaaatgatacagaatacttgataaagccggatcgcttaataaaaagtcgcgcacaacatccgcaaacttaagcaatgcatccctacctgacataccgattagatcgttcatcaactcatgacgtaagatcttaatctgtcttgcaccaactagtgatagcaattgtttgcgtcctgaaacgtaatgataaagcgactgtgagcggacatcgagcgccttagccaatgctggcaaagttgtagctgtcagtccttttttagaaattaattcagtagcttgatcaattattttatccagatcaagatttcttttctgtgccattttcatccctcctttgtcttagcatagtaaataatatacacctacagtgtgaagattacaatctacatagtgtaaataatttattttttctataaaaaaataatgaagccttctcggacttcatcatttccgttacttatgcttttttataaaccaagcattaaccgttttgcccaatttattaaaattcttgtgttgcgtgctccaaacagacatacagtaagcacgtccgttagtctgaacaattgcgacagcaaaatcatcatcaccaattgcataaatgccgccacttaagccagaaactaaacttggtcgctctttagctagggttgctaaaactcggctagcatattgccgatttaatacccgaccttgatacaagccaatcattgttttagctaaatcattagctgttgtctggccagtcatatttgagttgaccttagtttgagtggcacccatttttttagcaacttggtcaatattattaactccaatttttctagttaaggcactagctgcagttttgttacctttaagcattgcgctacgcaaataacttacaccataggtaataccaacttgaaacatcttatcacccttggctttgtcttttttgctaatcttaatcgcagttcgcgaccccatcttgcctttttgttcttgctcatacaaggcgatcagtaaaaataaccgcattgtttttcctgcgtcatgagccttattagtattaaaaactacggcaaagtgactagagttagttaaatcctgtgctactacctggaagctatcatcaatgcccataacttttttgatttgcttgactagcttctgattactgcctttttgagctttaacatggttagaatattcaatcgaattaaccttgggctccttaggcttttctaattttttaacctttggctccttggtcttctttttattcttagcgaccttgctgttatttggttcaacaatctttaactgcgcgttttccacccgctttatgtttgatgtatacaaaatgaatgcaaataaagtcacaattaaagaaccaattaatattttatgtttcattaaaacgcctcaattttagaagaaatgatgccttttcatcaaaatgactaaccaaaccattaaaacaaccatcaaaataatgattaaaacccagtcaaatgaattttttaaaattggtagactaacattcatcccataaaaaccggttaaaatagttggaatagttaataccaatgaccacacagttaagaattgcatggtatcattcaaattattgttcatcatattattactggtagctgataaagtcttagttacctgctgggaaatctgcaccatttctgcagactggcttgattcaatcaagacgtcatccaagcgttcactggcttctttagtgaagtctaatttgctgtgattcaggccatgcaacatgattaaatccgtctgaattgaacttgataaataaactaaacttttttcaatattcgaaagttccaccaaatctttattgttaatgtcatcagacaacttctgatctaggctgttacgttcaacgtcaagttgcgttacagcacgctggaagtattgtgatgaatataggaaaaagagcatcaacaactcagtaacatctttagcttcagacaaacgctcccgcatatgttcatcgttgaattcatcaaacacatagctggttgattctgtatggaaagtaaagatattttcacccactactaaaaaagtgattgggtgtgaggtaaagtgcttaatcgtgttggtcggccaaattggcacatcgtaaacaagcaagtggctcttagtatggacgtcatagtcatagtgaggacgttcgtgacggtcagaaatataagagataatgtcaggcgtaaaattaaaatcctgctgcaatctctcactgtcttcttcacttaaattattgatgtcataccacttatactttgttcttaccggaaaattttgttgtctaatcaaccagctcacctcaacttttattttattacctagtaaatggtaccatttttctcaattctttttccacaaaaaaacagaccttacggtctgctctttgaaatctaattgctatttaattttattgcttccaagcagcatcaaatttttgcttaccagtattaatttggatgttagtattttgacccttttgggctgcagcaaagatattttgcaaaatgctgttcaattggttgtatgcagcatttgaattcttagcaacaggaacactgtacaagttcttcatagcatcttgaagtttagcaggaagcttaatgctcttgttattcttgtattcactagattcgattgcactattgtttacaggaatgtaaccagtagcattagcccacttaatttggcttgacttagatactaagaacttaatgtacttaaatgcagcagctttttgttcagcgctagcgtggttaaacatgtaaatatcagtaccttgttgcatggtgtatttgccaggacgtggagcaacatcataagtaaacttgttacctacaccttgcttaacaaagccttcacctgcagaagtaccaacaaacattgcaaccttttcgttagcaaatggacctgaaaggtagtgttctgaaccagctactctgaagtaacccttcttaataccatctgcatagaagttgagaactttctttgaagttgaaccactgaagttaatcttatcagtaaagttcacgccttcgtccttcataccaagagtgtagtagttggatagtgaatcaaaaccagcacctacaactttgtggttactcttcttgtagatagtttctgaaacatccttaagttcttccatagtagttggaactttcttgatgccatatttcttaaacatggtcttgttgtaagtcaaagtttcaattgacttgttaaatgggataccgtattgagttcccttaatttttgcaccatcaagaagttcagttctaatgtcagatgcctttgcactgccccaaccaacattcttgttgttgatatatggggtcatgtttacaagcatcttgttttgagctgcgttccaaagccaacctggataagcttgagtaatagtaggtaagttatttggtgattgcaaagttgagttgatcttagcttgcaaatcattgtatgcaccttggttttcaagcttaacagtaattttagggttcttcttttcaaattcattagttaattgctttaaagtagaaccttgtactcccggcatagcgttccagaagacaactgtagtcttcttagtaatctttgatggaatcttctctgaacttgatgaagaagaattgccgctctttgaacaagcagcagtgccaactagggccaaagtagcaacggcagccatagtaagtttcttactaaacttcatttggataaatcctcccaaaaaataaaactaaacaacaatatgtttttgatttactaaagcgtgattgtttgaccacgtttaggtaaaatccgttctccatatgggttctcttccagctctggatgcaatgtgtgcaccggtactaaaacagctggttgaaccccagcaatgatttccttgagttctttttcatcggcatggcctgaacagcgcaacgccttatactcaatatcattgttagctaaagcctctacaaatggtttgtaggcaggatcaaaatcccctaatggctcagcatttgagtggatatacaaaccacccttttgcagcttatcataatcggtgacaacttgccacatgtatttatgattatctgctaaaagctcatcatagctaacttctagctctggcttaaggtcagcatagtgctcctcattaggcatgtaatagtaaggatagtcttcatccaaactttcattaatcaaatgggcacgctgagcatgtaaaacgacctttcttggtgaatcggcaatgattcgcaataatcgttcaacattagtaggataagtattaaaagtgatttggcgttcaggattagccttttgcaggcgcacgatttcttcagttagttctacttcattcttagggccagtaaactcttcactgttttcatcatgcttttcttctggccaagaaacaccagtaccttcaatgattagcatatcgctatttttagctgcctgcataaagtcccgcacccaatctggatgatagccatgcaagcgaatgtcgccagtataggcgatttgcttatccggtgtcttaactaatagaccagtagcaccgtaagcgtcatgatcactaggatatatttccaggataatatcgcccaccttaattggtttcttgtattctgccgcgatgattggacgagtataagtccgatcatgacctgcagcaggaagcaagaagtcgcccttttcattcaaggctggcaataaatgagctgtaattggacctgcataaagtggaatttctggggccaaaaagttcattgccttactgtgatccaaatgtagatgcgaaatataggccgccgcatgctcccagcggtcagtatcaattggcttacccgttaatttaggatcgtaaaaattaggcacatccccgattaatttatttttaatcagagtttgataactttcatctggcaattttaactctggccgataaacttcccccaagtcaaacaatacatgcgatttgttataggccacttcaatcatcggtccaccaattgtggttaaaccattataaaaagttactgtcgttttatcctttaaggtcattgcgcactactcctcgaataatttgctttctaaagatgaagtacaaaatcaagattggcaaaacagtcaatgtggcagcagcaagttgaagttgagtttcactacctgcatcagatgcaaatgaagttaaaccattgttcaacaatctcatgctgtcttcgttagttaccaataatggccagaggaatgaattccaaccagaaatgaaacttaataaagcaacggtgaacaagccacctttagacattggcaccaaaattttccaaatatattcccaatcactcgctccgtcaatcatcgcagctttataaattgtctgtgagattgaaccgaagtagctttgcaagtagtacatgtagaaaattgaagttaaaaatggcaataccaaaccaatataagtgttcaacaagcccattctggcaatggtattgtagttagtaaagataattgcttcaccaggcaccatcaataatgataaaagtaccatttgaacaacacctttacccttgaacttcaagttaaccatggcaaaagcaccaagcaaggcgttaaacaaactcacaattgtcgttacactagctgtgataaaagtgtttaggaagtaacgagtaaatggagcttgggcgaatactttggcataatttgaccattcaaaatgcttaggaatgattgttggtggaatagtggttgtttctctaaaactcattaatccacccaaaatcatgtagataaatggaaagacagtaatgattgcgaaaatcgctaaaataatataagcaatcaaagtgccccaacgaatcttcttcatcctttactgtcctccaatcttcttcatcatcttgcgttgcaagaatgtgacaaacataatgatgataaataagacaaccgttgcggccatcgctacacctggagtaccaacaatttggaacttgttatagatgtagaacactgcagttgtggctgagttaccaacacctgcttgtccattgaataaggcataaacagatgtataaatcttaaatgcagcaatgatattcattgttaataagaaggcgatcgttggcacaagctgcggcattgtaatacgccagaacttttcagtaccagttgcgccatacatatccgcaattgtgtagtaattagggtcaatgtttctcaaagcccccatcaagataacgatgttaaaagctaaagaagtccaaacaccaaagatgataattgtcgtcaatgacatcgctggatcatcaatccagttcggtgttggtaagtgaaccgccttgagcaagaagttaagcaaaccatagtcaccgttaaaaatataacggaatacgataccaatagcgatagttgacgtaacatatggcataaagaaagtcgtttcaaagaatgacttatgctttatcctgctgaaaataaaccaggccaacatgattgaaatagccaaagcaactggcacagaaattagggcatacaaaatagtattcttgattgcccgccaaaattctggatcactaaagatatattgataattgctgaagccactccaatttagattaattaacgagccgctttgaaaactcattacaaaggcccgcaaaattggataaatactaaagaaagtaacaaagataattgttggcgctaaaaagagccacgcctttttctgattgctcttcattagtagacacgctctccttccttagtaaacaggaatactcgatcaagacgcatcttcaaattgatattatcaccaggcttaattggtgtctcaaggttgactaatgaacgagcttgtaccccatcatgggtaaacttcaaaattcgttcacgaccgattaattcgacatcatcaaccttagctgaaactgcaccatcttcttcgactggcaaaatattttctggacgaacggataaaacgtactcgccgtcagttaagtcacgtttaaaacgatccttgtctaaatcgtccacgttaatttcaaaatctgagccagtaatcttgccgccattaacctttacattaaagttatcaatcacaggattaccaacaaaattagcaacaaagtagttatttggttcaagatagaagttttgtcctaagtcatcttgttggatcacgccattattaaagagaataatcttatcaccgattgacaaggcttcttcttgatcgtgagtaacaaacaaggtggtaatacccacacttttaactaaagcacgaatttcttcacgaatcttcaaccgtaaacgtgcatccaagttactcaatggttcatccatcagcagaatcttaggttgttgcactaaagcacgagcaatagctacacgctgctgttgaccaccagataaattgcccggcttttgatcagcaagttcggtaatctgggtcgttgccatatatttttcagcaatcttcctcgcctcatccttaggcatcttttgcttgcccacagtcagaggaaacattacattctgaagtacagtcatatgtggatataaggcatagttctggaaaacatagccgatctgacgatccttaggtgctacgttaacaactgacttgccatcaaaaaggatgtcaccgctagttggattaagcaaaccagctagcatatttaagatggttgttttaccacaaccagatgggccaagcaaacatacaaggtcacctttttttacggaaaagctaacatccttgattgcttcatgaccgttatcataaacctttttaaggttctttacttccacgaatttctcatcattcataagtttcacgcaccactatatattgatttaaatttttaaatttttctattaattctaagctaaatatacgaaaataacaaataattttcatttgaaattcggggtttcaacgactttgtgaaatgcttctcagcaagtattcggcttttgttcgcatttgcttttatttttcacttatttctttttaaaaattcgggtttactaaatattgtggtaggtaccaaaaaagccatgaattagtcatggctttttgtatcataagttatctccacgttcaaattgatattttgaactattcaaggcttgacgaaccaacttgctcatcaagttcttagtctttttggtaatcacaccagcagtttcatcattagcgctagttaaatatttaataagctctctgccttccatatttttagctttttcatcaataagatcaattcggccaataccgtagctttgacaatcatcacgataggcgtttacctcataaatatattggtgatagcgtggttcaacaagcacttgtaaagttttatacaaccagtaagcactactatctgaattaaccatatgatctgccaccttatagttaagtggtgtatcctcaatattggtgtagaaaggaacatatggtgaatatgcataaaagcccatattaatccattgaattgcagccatctttgcaggaacatcatttctaatttgcaagatgcttgattcttggtttctgtctaaagcaatagaacggaacatcttttgttctttttctgaaccagatgaaaaagtgtccattggatcgtatggtgtaccgttatagtgactagttaaaaatctttgcacatcttcaacaccaatcttcttttcgggaacgcgcgtaaatggcatttcttgactagttgggtcttgttcaatgcttggattaaacaacttctgtccataccaagttcttggagtattgtaaaaagcatcagcttcatccttagtaccaaaaatatctctgaaagaaaagctaccgtcagtactattgtttaaatgattcttttctacgaattctcgaataccagctgaatacataaagttatctggatcatcaaagtcaacattttgaatcaccatgatgttaggacaaattgcgtaagaatcatcaggaacacgagccgcaacccattggtgacccgcgccagtttccagataccaaacttccttgttgtctgaaaaggcaataccgttgctttcaccggtaccatatttttcgattaattgccctaagcgcttaacaccttcacgagcagtcttcacgaatggcaaagtaatataaaccattgagtcttcgttgattccatttgctactaaaggatcatgtcctaagcagcgagcattagtagcttcagtttcagtggctgacatagcaacgttatattcgttaatgccttgctcgtcccagcgaccttctgaatcatcagcagtagggacagcagtccatttgcagccatcgccctcaaggtgcatcttaaagccgttatattttgatacataatcttcatcataatgacgggctgggtttaccacaaaaactttttcgttaatgccaccataaccgtcttcgtcacgcgcaatcatggttgatccatcgattgaagcgtccttaccaactagcattgcagtacagttatcttttttcattattgtttgtacttccttttttatttcagtaataatttttcatattattaattctactactcattaacctgcatttgccgatcaacttttgctcgaccgttattatagttaaaaacataaccgggctgcacgttatagagatagacattgaagtttaaactgccatcagttgaaacggcctgcaaattcacgccgcgggccattaactcattaccacgaaaaacagcagttgcttgataaattacacgcttattctgccgcagtgctctcctaaccttagcctcaaaaatagtctgaatcttttggttagaataagcagattgcgtaaacaaattcttaggattattttggtcccctgattgattgcgtggatcataattgccgctttgatcaattccagctgagactgaataggcaatcaagtggccccgattatagatttgggtaccgttacggtgattatagtgccagccagtcggttcaacatattgccttactcgcaagctatcattagccacattgcgcttttccaaaaaggctgtattagagcgcgatgttcgattcaatgaatcaaggttagagtaaatcacccgatttatcttccatgcgcctttgaccaaagtcgacttatcatggttgacttcggtataagcgcgactgccactcttaaaattcaaattagctaatttttgataatcagttgacgatagacctccataattggtcttggcttttgatgcatcgctaattgtattagttacatgttcatcattattgccagtaaagtcacgcaaaaactggctaccatttggatcgctgccagctttagtaaaaactccccataaaatcgcgattaagacaattaatgatgaaacaaccgttccttgtttttttcgtcttcttcgtgtcatctttttcctctaactacgagcccaatcatcaagcatgcttaagaaaaaggtctccgaaaaacgcttaatcttagcaccatttttgatcaaatcacgtgctgcattcaaatcctgattatcttttctaaagaaatcttgatcacccatgattaagtaattagtcgttgctaacactgaattgtcaacttggccgcccatattgttgatcatcttgcccgcttcagcttcgttcatatgaatattgccagacaaaacgatattcttattttgaaccggattgtgccaacctaagtcaacataatccaattcgccaatagttaggtcgatattcttaatcttgctttgtgccttttccaataaatcatcagtaaagtgctgggcaaagtcatcataaaccttgatcgtatcaagagaatcctgcaaaccgtggtgagcctcaacttgagcaattccagcccgctgcatgcagtcaagcagacggttatggcgctcgcgtggataatatgtccgcgccaaacgcaatacgtcaacgtaatcattatcaagcactggtaagccatatttttgacttaaatcatacaaaaagttcaagtcaaaattgacgttatacccaatgataacgtcatcaccaataaactcacgaaattcacgaatagcctgctcagccggaataccttccttcccaatttgctcttcagtaattccatttagcttagtaataaaagcaggaacagaattattcttggaaaacttcaccaaattagtatattgatcaacaatttgaccgttacgtaccttaaccccacctaattcagtaattcgatcgcggtaaggatataagcccgttgtttcaatatcaagcattgtataattggtcaaaaagtcaggcttttcctgtccttttttacgcaacttgtcttgcgcaccggtcacatgtaaaattccattttttatgtaaatactcattcttcacctatttaattatttaatcaaattcatcagcatctcgtgcgaattgctatcaaaacccattgctcgtttcttaagatcagctggcaaatctgcatcagctaaatcagcggcaatataatgccaattaggaaattgctgcactagctttaccattggatcaagtaattgaggactggtctcatctacgcctaattccaaaattacgacattcttgtcctcggctcccgttagaaaccaacgaaaacgcgtattagcatcggtatcagggaagaagttagcattcagcggcatatgcaattccattggactattgcagtcctcgcactttggtactaaatctgccgttacgttgccgttcttaattgccgtcataaagcgttctactacttcatggttatccttttgaccatgattaatcccgctagaacactgcattttagtccaatcaccaaaggcattgaaaattcgattttcattaaagcctgcattttcaaaaaagtgcccgaatgtactggtcgcaataaaatattttttatcacgaattagcttttttagagcaagcatcgtctcactaggctcatattgtaaggaatattcgttgattagctcactccaaaaagcccattgctcgctccaagtatcaaatctcttatctaatgcatccccaattgtatgcacatcatacttatctgcaattttgccaaattgatcatcaaagccttcttcacttaggatatctagtccctcttctttggccatgccattaccagccgttacgatcaccgtgttagcatttttcagccatttttttgctgtcactaaatctgccattttatctctttccctttgaataacctgtcaagcgtaattgtccattaatgtattctcctaagaaaacatcactgatactattataacctgcctcttcaacttgttgctgtaaccaagcttcgcttttgtgaatcaactctaagacatcaatattagcctgaccatcactaattattgggaaacgaatgttagcttcatcattttcaataatagttaattgcccgttttgctcaaagatacaattcttaatcttttcaacagagtagatacctcgactgcgcaatttaaacattaattcattagcggagattcctgctttcatacagttgccaactaacaccttgccatttttaattacttgaacaggtttaccatcgataatccctctaatccaattattgtgatcacggctgaatttcaaaataaaaacaaccaacgtccaaacaattagaactaggaaaaactgaagaattgtaatactaggattgtaaatcaagccaccaataattccacctaaaacataattctgcaactgatctaatgcagtcgtaggagccagattagacttaccaaagacattgatttgaatgattaaagttaagataccgagagcaaacttaatgaataattgtgtgtaatctagctgcattattttattacctctactttatgatcaattacatgggcttgcgttaatgtgtaagtattgcgatcatcattaaggtttaactgataatcaatatttttagaatcaatccttacgatcatgccattagttaaaaccgttgaactaactaaaacatcagaagtcgaaacattttcatctttagcaatcgatttgatgaatggcacgatttgaatcgcctgtgatttttgcgtattaagttgcacatatttttcatattgcgtaccggcaaacaaaagcaaaaataataaggcaataatacccaaatcgcgatacttggttgcaaaacggttatgtaaatatagcaaagcaaaaattatcattgctaacgccgagactgtcaagaagtttgtgtaaataatctctctcgttgattgacttttttatttatcttttaatcaaaataggattctagggtgtctcgaacttgcccaaatcctttatgaatcctgttaaagtaacggtcattgtaatccattgcctgaactccaataaaggtgtcaagcgactgctcagttggaaattctgttttaggcttggttttccgcttaagcctgttgttaaaggattcaatcatgttagttgagtaaattgaagctctaatagctggcggatagttgtaaaaggttaacagatcaggctcaacctgtctaagatctctaactacgtttttgtaggctttttcccagttttgatagaattcatgcagcacctgtacagccatttctttgtttgactgagtatgaatctgcttgaattcatccagtgctttttttcgatcgtcaacccgcattttggcactgatattacgcatgacgtgtaccaagcagcgttgaaaatgcgctttaggataggactggcagatagcctctttcatgccaactactccgtcagacaagaagagctctacctgttcaaggccgcgactcttgaagcctttgagcatttcgctccaaatctcaatattttcagtaggcgcaatacagtagtcaatcacttctttatgaccattaggtttgataccgatggcgatataaactgcttcgcgctcataagtgacccgcttaagaggaatataggtggcatcgagataaacgcagaagaacttatctgacagatgtcgctgatgatatgcctcaactttgggaatcatttctttagaaatattggaaaccatagctggagaataatagccgccatacattttctcaatcaaatcagcgatttctcgggttgtgacgcccttggaatagagcttgataacagtttgctctaaaacatcagtatgccttttataatctggcatagtgtgttgatgaaactcaacgtttctgtctctaggaactttgatttctatttgtccgaattgcgtatcaaccttgcggtaataagcaccatttctagagttgccagtattccagccatttctggcatagggatcatagcccagaaaggcagtcaattcagcttctagcaagttattaacagcctgttgtagttctttgcgcaataaatcatttattttgtctggattgaatagagcttgagcaaaatctttggtaaaatcattcatgaaggagttcttctttctgtatgtgtttttttgttcaaaccaatcatacgagaaaggaactcctttttctaatgtttaaagaaataaatttaaggaatcattcatccttacacaaactattttacagtctcctaacgccgccaccaacatcaaagcatataatactgcctgattagtattctggttattttgaatatatttcattgtataaaaggtcatgctctacctcacccttcatatttttctttcattctaacacagaaaaaaagtagcactttcgtactacttttactagaaattattcacttttcactattattaattatttttgaatttcttttaatccagctttgcgacggcccatgttaaaccatggtgaaacagtgaaggctaacacatcattaattacatagatcaatgaattaattgccatggctaagtttgcatcaccttgagcataagttacgcccaaaagaatcaactggaagacgccactagcagtccaccaaaagtattgattgttgtaacgcataaagcacatgatcccagcagttaatgaaatagcaaaactaatagcatcaatccaaggacgaggatcattggtaaatttaccaatcaaaaagccggatacaacataaacaagtaaagtaccaacaatagcaacaagccattcctttgaaccgaattttcttaagtgattcttagtgtcatcattccatgatctaacagcaataataactggtaaatctaaagttgcaatataagcaatctgttcaaaaatggaaagataattcttagctgaccaacctgcatagataaaacaagcagctgaaatcaaccccaaccaaccattaattgctttagtagcgttaattgccaatacacaaagtgtacccaaaagcgtaccaataaaagtaatcaaagttacgcttgtaattttgccttgaatcagcaaagctaattgaaatccaaacgcaaaaaaccataaacagtaattttgaactggccagcctttcaattgattaaatagccaaacaaaataattttcgtgttttctttccattgtactgagacgtaaaaagtagacaattaaaatattggattaatagaggcttgacttcgatactctttcggggttaagccttttaatctgctctttatcctttcgttgttatagtattcgatatattcctcgattgcttgagttaattcttgaagattatgatacttgtattcttgatcatagaacatttcagttttgagcaggccaaagaagttctccattagcccatcatccatggagttgccctttctggacatgctttgagtaataccatggagttttaaagctcgctgataacgagggctttgatactgacagccctgatcagtatgaaaaatgcagttattaagagctgtttctttggcaaaagccttgtcaagcattgtcattactaaatccatatctggatgtttggagatagtataagaaactatatcgccaccgcagccgtctagaataggcgataagtaaagcttttcattattaagatgaaattcagtgatatcagtataccattttgtgttaggcagggctgcgaagaaatcacgatgaattaaatttggagctattttgccaatagtacctttatagcttgaatatttgcgcttattgcgcctgatgcctttaagacctaatttatgcatccaatagcgaacggttttctccgtaactttccagccctctctgattaactgcaaagctactctgcgatatccatagcggccttgatgatgattaaaaatctcatggattctagcaataagctttgaccgtttaggcttggcgggctgtcgtttgataatcttgtagtatgagcttctggcaattataggtagctcagggtgctctgcaatcgcagctaatacataatttaaactaactttgaattcttgccttagatccgtaatcaccctagctatttcttctgatcttcttggtccaaggcacttagtttttttacgtattcgttcacaatacgcaatcgcaagttttcttctttcagctgctggatctctttctccagttccttgcgagatttctgcttttctttggtcacgggcagggcgtcctttctgtttgataatgacattatacccgtttttcttatattctctaatccaattgttaagcatgccaatacttttaaaccccagttccaaagacagctgtaagtatggtttattgccaaagattgcttgttcaatagttcgctgcttaaactctttggaatagctttggtttttagtagttaaaatttctattccatgcatatcaattaatctaagcatatagtctaaattagctagattcattctgtacgctttagccaattgactgattgagatattttcatctttccatttatgataaatttctattttttgttctttattaaatttagacatagtaaacattctaagctaaatagtgaattagttatccgacgggataattgattcactatttttattcttttgtagaattaaagtagtggtaaaacgatatgccctgaggtctttagacacttgatgtcgcataataaactggcagttttacttaagttttcaatagtctcttcgaagaatgtggacactagatgtcgagtttagaaaattagatctgatttcttaagtaaatacgttttactactaagttttggaggtttttattatgcaagttacttttggaattgatgtaagcaagtctacttctactgtttgtgaactaattggtgaaagcaaaaatgaactaaccattactaataatcgtcctggttttattcaattgcttcatgaattaaccgctttttctaaacatccgcaaattatttttgaagctaccggtgtttattcacgcagactgcaggcttttcttgaagactacggctatgaatatgttgttattaatccgcttaaagccaaaaaagagatgaatatggggctacgctacaacaagaccgataaaactgatgcttatcatttagctttaattcaaagactttatcgccatccggttaatcaaagcgaatcccaaacttataagcagcttaatgctttgagccgcttctatgaccagctgacaagtgacttggtaatagctaaaaatcgacttcaccaagctctacaatcgacttttcctgaaattgaaaatttattttcttctgctaaaggtaaaaattactggcaaatagttgtgcgatatcctcattgtgacttagtaagaagagaagataaaaaacagcttattaactggttaatgagcttaaaggggattgcttttaaacacgctctaaggactgcagataaattaattgaattagcttatcaagcttatccagttgtatcttgctctagcatagaagtcgagcaagtgcagtattatgcacacagattgcttaatttaagtgatcaaagagaaaatttaatcgcaagaatggttaagttagcgaagtctttgcctaatcatgatttagaaaacctagaaagcattccaggctttgcacagaccactgctgtcagagttttagcagagttaggagatttacgcagatttagtaatcctaataaaatcaatgcttttatcggaattgatccaggcagatatcagtcaggagaaatggactctaatttaagtattactaaacatggcaatgcagtcgcacgtaagttgctttatcgagctattggacaaattgataatgcagctaagacaaatccgtgtcatatagcagattattatgaaagcaaaaagctatcctctcaaaccaaagggttcaaaaagatagctattgcttcaattcataaactaatcagaaccatttatgccctgattatcaatgatcaaccatatgattacaacgtagccacacataatcaaaaagactttagtcgtaattaattgatcaagtacattataacgctaagcccaaaaatcagatatggatctgggcttatttgtcgtgtctaactaaaaaaataaatcgacactaaaagatgtttaagttgaaatttaaacaaaaaatgaagccaaacttcttattatgcttgactttacgtagaaaaagacctaaaagtgtctaacttttaggtctcagttcacatcctattcaacattccccttttttattttaggttgcaaaatacaagatcttgtgccttatccgtgctatgtaaaaaaacatcgatatctagtatagtggaccattaattaaatacaagaattgacatttttaatttttgcgttaataacatatttctatttccgtttatcaagcaaacatttattaattttttctaaacagcaaaaaaattttgttccttttagtgacacagtgtcatatgatatatacgtgattattaatttatatttttatggaggtacactcatgtttaaaactaagaaaacgcaatttgctatccgaaaattagcacaaggcgcctcagcagttttactttgcttcggcatattgggcggagcaagtgcacctatcgttccagctgcaactacagatgacccaacaaaaacagtcactgaaagtacaattaatagtgagaatacttctttcaatattgaaaccaccaccaatgcatctgataaattcgcttccatcagcaaaaatgggggggtacaacggtagtgccaaattctgctgagccagtttctccggatcagtccattacagaaaatgataatcagcaagaaaaaactactgtagagaattctactgagatatctgagcctgtcaaagacatcaataagtttgataatgatgccaatgttgataaagacgaaacaatcactgtaaaaaagccaacaattaatgtcgacactgaaaaggtagaacaaggcgatgaaacagagaaaagtaaactcgaagaaattaaaaagtatattgaggacgtagccgcaaaacatccattaggcattgccggaattttccacctttttggtaacgaaatagatggatctgctcatattgcaggaaatgtcgcaacagacaaattaagtgctggcaacttcggtactatccaagatgccactagtaacttgactacttgtgatattcattacatcggcagtattgatcatttgaatcagattgatggcgaaaataaactagttatttttggtccagatgttgaatataaatcatacgaaaatggtagttccattcaggtaaaaataaatggaaattggcaaaaagtaggaattccatacaacaaaactatcagagctgaccaaattctagatattcaaggcgaactagataaattaagcgataaatcagacgaatgggctaagcaaacgcaaaccgaaggcgtaattgctgatttcaaggagggtaaatagttggatcgacgtttctaatgctatcaaggatggcagcaaagatcctatttatgtaactattgatgcaaaatacctttcaggcaataacaagcatgaaattgctattaaaggcatccctgcagacgcagaaacaccaatcatcatcctaaatgtaactaatgttcaaaatggcgatttaaccgttagcacaagacttgttttggattattcagaccaaactagcatcaatggcgtaagtgaaaaaccatctcaacttaataagttattatggaattttggaacagatgttaaaaatttaactattgaaggagacttccatttaggtagtattttagctactaacgcacatattaccgctaacaaaaatgttgacggtaatatcattggtaacaaaatcactattaaaggtgaaactcaccgttgggacctaactccgccattagtagaagttgaaactccgccggaggatccaaaagatccacctaaagaccccgaaaagccagagaatccacctaaggatcctgaacctactcctgagcctgaaccggaactaaagcctgagcctactcctgatcctgaagaagagagtactcccccattaccagaagaagtaattcctccaactgataatgaaaattcctctgacttcaaggaagaggacactgctcctctaccagaatctgttgtagaaaaacaagttaaaaagaatcatccatccccttcaactactgaagaaaatattgcacctcatgctgcgactatcccaacctcaactataactgaaaaagaaacagttttacctcaaaccggtgaaagccaagacaagctaatgacgattggactcatcactactagcgttgcttcattgtttgcagtattaggcacagtaatcaaaaaaagaaattaattaaaaatgattcaattcaagccatttttattcttaaaataatctagaattaagtgaggattaaaccatgttaaaaaatagactaaaaatattccaacaaattcttcctactaaggcaactaacactccaaaataccaattgcctatcaactattacgatcctgaaggcagcatggttggcacttattctggaattaacttggcggcaaatgaaactatcactcaccaccagctcaaaagatttatcaacatccatcttcccgaaaactacgaagtttttccttactttgcttatcctaaggagaatatcacctgtgaaaatctgcctgatgaaataatgatcacaatcagattatctaattaaaaaaggcgactcgattgagtcgcttttttcattgcaattgatattaatgttgcgaagcaccagttgtagtatctggttcttcgtgcttttcttctttaacttctgcagccttagttgaagcaccagttgcggcgtctggatcagaatttctacggtaagttgcaccagtagttgcatcatcatctactaccaatttttgaccagtagtctcacagaagtacttaactaatggatataagtctttgacccattcataaataccagcatagttaccttggtcgtcttctacacgcttataatagtccacaaccaacttcttcaaattgcctgttggtattggcatataaacatcatcatgacctgcttccttagtccgcaaagcatgaacaacttttttaacattcggaataacgtcacgaacatctgggtgaactgcgcgcatcgtatcacccacttgatctggcgtagctagcattttcttgttaggatcagttggacggttataccacaagaattggttattatcatcaacaaatgtcattttaccaatggtatttctcagcatccaattaagttggttaacagttaacagacctgcatcaagtttgacataatcgtcaccctccgcagcatgaacttttttagctgctttatctagccaatcaggatcatttttatcgattccctcaactgtatacttagacttaccctttgcatcgaaatcttcttttaagtattcatcggcattcatatctttaagccattttggttcagccatagtaagaccccctcgtatgaactttgttaatctaattatataatgtaagtggtttcaattcaacaattttaatatatttatataatatttttactagctggattatatattattttacgcgtggtgctagttaaatctttctagacaataagccaaattataagctaaaattgcaatttccaaccggctttgaaagcctatcagactacgtgctcgattgttctcggcattgtaataggtcagaagcgaaaagtcgctttcaattgttctgcgaatagccatcaattgatgatcattgtgctttttagctcctgtcatatttttacgatatggtgtccaaagttcataacccatttgttttagctgttgatgcagttctttgcctaaatagccttcgtcgccaagaagatagtaattagatggatgggtattttccagcagttcaactgtctccctggcatcatgaactgatgcttttgttacgacataatcaagaatgtaaccgtcatcgctaacaatgacatgaactttgaaaccatagaagtaaattttcttggtggccttataaccaatgttggcataaccgcgaaaaattttagcacgatagttgcgaattggttggcaaacaggtaccggaaagctgtcaatgatcaagaaatgtccattcaggtcaacctttttattcatttcttgccgtatctgataaatcaattgcaatagctgacgtgaacgccgattaaaacgtgagtgtgataaacaattgaaacattcacagaatcttctttgtgattcaattcctgtcttagcttgccagataagtaaagccaaaatcagactgtccgtagttttaatttgatcaatatttcgccgatgagtaaactcagccggtgcatacaaacgataccagtgccgacaaattatcactaaatctttaaaactaacttgtaaatggtggctaaaacgcttaagcttaaggcagttcaatcagatcagactcttttctattattactatttacaagtcgagtctaacaagattggacttttttattaactaaaacgatttaactagcaccctgcgtattattttatataaaaaaagctgatcaacgagcaactctttacatctttgtctcaattgtatgagtgtccaaatgaatgatcacgtcaaacatcgctttttcttctggtgaaatcttatgagccacctcaataacagcaatacgtggattcttcaacagcgtcttatgaatgcctaacgacaagttcgggtcaagcgcacttgtcgcttcatcagccagcaaaatcggccgatctgataaaagcgcgcgagcaatttctactctttgaatttgtccacccgacaagccactgccgttttcacctacagccttgtctagaccctgttcctttaccaattcatctagaccagcctcatgaataacttctttcaaatgctcgtcactcactttacgtcctaacgtaatgttgaaacgcaacgtatcatcaaacatgaatggcttttggttaacataggaaaaataattatgggcagcatcccaatttcccgttacatccgtaccattgatcaaaattttaccgtctttgggctttctcaaacctaatagcaagcgaagcaaggtggtcttgccccaaccacttggcgccatcaatagaactttttcacccggcttaactgttaagttcacattctcaaagatgcgtttgtgatcactacctgtaacataagataattgttcaacctccataccatcaaaatgatcgatcttctgcttatcatctttcagcacgtgatgcaaagcgcgctgggtcttttcccacattggcacagtcgacttgacttggttaaattcgttaaaaagagtcacgattggcgtgataaagttcaaggccaaatcgaccatcattactaatgtacccacctttaaatttccctgcagcatcataataccgccaatagtacatggtacgatgaagcaaaacaattcagcagctgaataaattaattctagtgcccaagcttgagtcaacgtcatattacgcagagcgttctccattgcctgggccgcaccagctgctcgtgtaacgatgttggtgcgcacgttataaagcttggtagcctgtgccccatttaatgaatcggacacattttgcgtatagttagcgttagtcgttgcccaaatcttggacttacgtgtaatgataggactagtaatcatttgaactaatgctggcgcaagcgtagcaatcaaaaatactagggtcatctgccatgaactataaaaagcaaaagtaattgccccgaaaaacgacaaaccttggaaaatcatatccaattgtgccgttatccgattagtttcaatctgttttaaatcgttggtcatcagtgataaaccgctcttgatatcaggctcaccttgatcaaccaaataacgcaagttagtgcgcttaaaggtcatattcacgtcacgaataatgcccatctttaccgtttcatagacaaagttactggccataaaacacatctgacctaaggcagtcaaagcagccaggcgaatcaaatgcagataatcatgcgatcctgacgaagcaacattcaacataatttgtaccatataagctacaaagacgatgttgcaggccttgattgcggccaaaatggtatagctaataatttggctttttttagcgtacttcaggctcattaatttctccttttctatcccgttagaaacattatacccgctagcttgtctttttctcaattagatacgataattagagtaatcattttaatttttaatgaaaagcagaaaggaacttttaatgaagactggtactaaaattattactttagacaacggttatcacttatggaccaacacccaaggtgaaggcgacattcatcttctagctttgcatggtggtcctggcggcaatcacgaatattgggaagacactgcagaacaattgaaaaagcaaggcttgaacgtgcaagttactatgtacgatcaactcggttcactttattcagatcagcctgactactctgatcctgaaattgccaagaaatatttaacctacgaatatttcttagatgaggttgacgaagtccgtgaaaagttaggacttgataacatttatttaatcggccaaagctggggtggcctattagttcaagaatacgccgttaaatatggtcaacacttgaaaggtgcaattatctcctcaatggttgatgaaatcgatgagtacgttgcttcagttaacagaagacgccaagaggttttaccacaaaccgaaatcgacttcatgcacgaatgcgaaaagaacaacgactatgataatcaacgctatcaagatgacgtacaaattttaaacattaatttcgttgaccgaaagcaaccatctaagctttaccacttaaaagacattggtggaaccgctgtttacaatgctttccaaggcgacaatgaattcgtaattactggtaaattaaaagactggcatttcagagatcaattacacaagatcaaggtgccaaccctattaacctttggtgaaaacgaaactatgccaatttcaactgctaagattatgcaaaagaagatccctaactcacgcttagtaactacacctgacggtggtcaccaccacatggttgacaaccctgacgtatattataagcacttagctgactttattcgtgaagtagaaaatggtacatttaagggcgaaaattaattaacagatattcaggctggaatcgatttccggccttttatttttaaggaaaatgatatggatgaaaaagatgtcaaaattctgctagttgaggatgaagaaagcgtcgctagcttcgtcaaaactgaattagaatttgaggattaccaagttgtttgggctgaagacggcaaaaaagcattagacctttttactcaagaaaagccaactttaattttgcttgattggatgttgccagtatatgatggcatgaccgtgttacggcgaatccgcaagcaaagtgatgtccctattattatgcttaccgccaaaaattctgcctctgatataagctctgctcttgatcagggactagacgactacctcaccaaaccatttgaaatcgaggaattgctggcacgaattcgggtagtcttgcgaagactggaaaaaatgcggcagcaaaatgacgtccctgatacttccctagaatttggcccattaaaaattgatctgcttaagcacgaattttactgtgacaccgagcaaatttatcttactcctaaggaatttgccttaatcactgaactaatgcgggaccccgaaaaagtcaaaagtcgtgacgagttgcttgatacagtctggggatatgactttgttggtcaaaccaatactgttgatgtttatattcgaactattcgcaacaagataggcaatccctacaaaaagatcattaaaaccatgcgcggcttgggctattgtttgagaaaattagatgataatcatgaaaaaagctgatcctcaaacaactacgcaacaattaacccgtttattcgttaggctatttgtcgctattttaattctggtcaatttggcttttctaattatttcatcggcctatatttattaccaagctgaacggcaaagtgaacaagttgttgaagcagtaaaagaaaatcttgattcaaaatatgactggtcggctatgctggatgcttatttggcaaaacaagacgatgatgccatcattttaaccacccctcaaggcaaaagttattactctgaaaatgctcacgagacctttaaacaaattaatcgccaaaatcattatcaaaacatggtctattccaataagcatatttacttcttacggacggaaaactcgcatgactttaaaatcaaggttgcattaaacattgatcgcttatttcatttaattatttggctatttgggacaatgattgtcatcaacttaatcgctattctgctgagcatcccccttattcgccgttttgcccacaaatggagtcgtccaattcaggtaatgaataatgaaattcaagaaatccagcaaggtgcttcaactgagcaaatcacagtgccgcaacaaccattagagattcgaaaattagcccagtcttttaacaatctgctagcttttcaaaaacaggccttacagcgtgagcaacaattcgtcagtgatgcttcacatgaactcaaaacaccaatcgccgcaattcgaggacacgttaatttaatcagacgccatggtcaagccaaaccagaaatcatccctaagtcactggattatatcgatactgaatcaaaaaagatggaaatattagtcaacgatttactcaccttaggaagaatcgaacgcaatactgaagtcgtcaaaattgatttggtaagaattattaatgaagtagtgtcagaaatacagtcagtttatccacaaaaaatacagactgacatgccacaagtattgaaatatcgtattaattcactagattttcacaacattgtgcacaacttagtggaaaatgcggcaaaatattctcctcaagacagcactattgtagttaaattagctaaaaataaaggacaggtctctttcacagttgcagacaacggaatgggcattgcgccagaaaatcgcgagaagatctttcaacgttttttccgtgaagacacgtcccactccaataaagttaaaggatctggcctagggttagcaattgtcaaagctgaagctgataagtatcatggtcaaattaaagttacggataatagtcctcagggaacaatttttacagtttcttttcctacagaaaaatgaagaaatcttcatttaaactctattaaatcttagttttttaaagctgcttagctagtaagataaatatatcaagttaaagcaaaacaaaaaattatcaatagtttaaaggagaacatattatgaagactattaacttaaagaaaattactattactggcgtagcattactcggcttaggaactgctgcaattaccgcaactaatttagctactgaacctaacgtagttcaagctgcttcaagcaaaattaaggtttcacaaaattcagctgttaaaaagtttaaggcaaaattcaaggcagctaaagtcgaatcaatcagcttagataaagaaaaaggccgttacgtttacgagatcgaaggcttcaattcaacgagagaatacgaaatgaaaattaatgccgcaactggcaaagttatctcatcccactccgaaagacttgatcgagacgagcgtaataaaaaagcattaaatctcagcaaaactatttctcgctcaactgctactaaaattgctcaaaaaagagtatctggcaaggcagttgaatggtcattagatcgtgaaggttcaaagaatgtttgggaagttaccatcagcaagaacggccaaaagagcgaagtaaaaattaacgcaattactaaaaaagtaatcagtgttgaacgggactaattgagaaaagaaggtatagaatagatgaaatttactaaactgacaagtattgcattattaagcgcagctttattaacaggaactgtagcatgttcaaaacaagataattcaactgctaaaactactacccaaaagagtgttacttcatcaaaggttacacataattctgaatcagcaatgagcaaacaaactcaaaaagataatattcaaatcaaattaagccagcaagaagccattgataaattccatcaacaatttagtggcaaacagcttaaaagcattgaattaaatcgtgaaggcaaacattacctttatgaaattgaaggattcgattcaaacaatgaatattctgttaacatcaacgcagaaactggtcaaattggacatgttcattcagaaaagttagatcatgatgatcgaaaccaaaaagctctagatttcaagggcaccattagccgcgacgatgctagtcgtatcgcagaagagcacattaaaggcactagcgaagaatggaaactagagcaagacgaagacactggtaaaacatactgggaagttaaggttaaaaatggtcatcaagaaaccgaagttaaaattaacgctcacaccaaagaagttatttcaactgaacatgatgattaataagattaagaacataaagaaagccgcaacattattctcgaagttgcggctttttattttgtctaatttttggataacttttttaccaataaccaatcagtttgaggatcgctaccaacttggaaagtatgctggctcactttttcaaatccatgacgcttataaaaatattgtgccggaatgttcttttcataaacgcctaaccacatgtaatctttgccttcttctcgtgctgtcttttctgcaaaatcaaacaaaacattgcccaacccgcgatgttgaaaattagtacgcagataaattcgttccacttctagagcattatcacgtaactgctcagtctgagcatccccaacattgatttttaaataaccagcaatttttcctttaaccattaaaaagtaaaaacgactattaggattttcaatctctctaatcaacttttccgtctgataatcttcctctaaaaagcgtttcatgtcatctggtgcagtataaggatcaaaagtcgttttaaaagtttcacgtgaaactttctgtaattctttcacatccgctgttgtaattgctttaatctcgtacttcatcaatatttcctctttccaccgttcttaaccaggtgccaattttcactggcattcttttctacaatttgtaacaaagcagctaattctgttctctgtttttgatctagtcctgtcaaaactatttcatttgaataagcattttctttttctattcgagcagctaatttatctcctaattctgtcacaaacaaatgcttaatctttttattctgctggtcattttctttcctaatcagctgattttgttccagttttttaatgctacgagctgccgtcgtccgatcaacattaagcatccctgctagatggtcagaaataattcccggattttctttaatgcgggctaaatacaggtactgacctcgattcaattgcatctctttaaattcaatattagcaatcgaatcaagtgctcgcgcaatagtgccaatttgacgcaaaatatcttctttcatgtttttcacctaaaaactattatatttaattttgttgtaattgcaacaataaaatataaaaactaaaaaagggatcgctccctttagttaattcatcaatttttctttagttcatttagatcgactacctgatcagctaactgcttaacttcatctcttaagtggtgagttaccataattacggttttatctttttgcgtcaaaatcaatctttctaattgtacgctagaagctttgtctaaggcagaagtagcttcatctaacagataaattggtgtatcacgcagcaatgcacgtgcaaaagcaacacgctgtttttgcccaccggacaactgtttaccttggtcagctaaaacagtatccatgccatcaggcaacttagcaattagatcctctaatccacattctttgatcacttcagaaatttttgcttttgaaacttggcgtcccaaagttaaattccaccctagagaagcagtaaaaatatatggatcttgctgcaaatatgtaatctgatcatgcaaatccttatctgaaatctggttatattccacatcagaaatttcaattttcccctgataatctctaagtaagccagaaatcaaattcagcagagtcccccatcagaatatatttatttttcagtttaaaatttaaattcaaattctcaaagataggcttatcttgtccagaatactgataagaaactttatccaattctagattgcttagtttaaaatcagcaggcaaagctccatcaacagttttaagcggtatagtcttaaatttttctataattggtttaactgatttgaattcttgccaattaaaactaatcccacttaattcagcgaaaattgtactggcaaaaaattgtgccccactgatggtcccgactggcgttaattgatgcaaaatcaaccagcctgtttgccctaaaatgataacttgactgataaaggctagaccattggtaatcgcctgagttatcccggctgttttactataatttagcgcatgttttttaacatcatcagaagcgccattgatctttttgacgattgtttgcggtaaattggcaagaaataaggtattgaagccattcaacacatcattaattgaattaaccaaacgttcattggcatgggtatattctaatgaccttttggccaaaattttagaaaacaaattgggaaccactcccataataattgtcaaaataatcacagtgaccacaagactgacattgaagtacgccaaagtgagcataccgaaaacaatttcactgatttgtctaatgatcatcatgaaatcctcgacaccaaagttattaatggttgtaatgtcattggtcagccaagaattgtaagtagctaccgtttgttgatgaaagcctgaataactcgtctgtgatagatcttgcgcaatgtcatttctaattaatttatccacattttgtgccaaacgggtttgctcaacattgactagacagttaacaatcgcgtaaaaaatataggcaccgcccattaaggcaacccacatgaaaaaacgctcagcttttaattttgcaactgcacttaaagcattagcgctagatattccggctagtgtcaaaaagcctgcattaatgactattaaaaatgtaacaaataaaaattcccactttaatcttttaaaatattgcagtaattccattgattctccttatgagactgtaaaatagtttgtgtaaggatgaatgattccttaaatttatttctttaaacattagaaaaaggagttcctttctcgtatgattggtttgaacaaaaaaacacatacagaaagaagaactccttcatgaatgattttaccaaagattttgctcaagctctattcaatccagacaaaataaatgatttattgcgcaaagagctacaacaggctgttaataacttgttagaagctgaattgactgcctttctgggctatgatccctatgccagaaatggctggaatactggcaactctagaaatggtgcttatttccgcaaagttgatacgcaatttggcccaattgaagtgcaagtgcctcgggatcgcaacggtcaatttcatcagcacacgctgcctggctacaagcagcactcggatatcttggaaagcatgattatcaagctttactccaagggcgtgaccaccagggaaatagccgatctaattgaaaagatgtatggcagccattacagtccagctcaggtatcaaatatttccaagcagatgattccaaaggttgaggcttaccacaaacgcaagctaagcgacaagtttttctgcgtctatttggatgcgacataccttcctttgcgccgagaaacatttgagcgtgaagcagtctatattgccattggcatcaagcctaatgggcacaaggaggtcattgactactgcattgcgcctagcgagaacattgaagtctggacagagatgcttcaaaacatgaaatcccgaggcttaaagcaagttgagctttttctttctgatggtgttgttggcatgaaaacagccttggccaggacttatcctaaagctcattttcaacgctgtttggttcatgtcatgcgcaatatctgcgctaaagtacgcgtcgacgatcgtgaaaagatcatgaacgaattcaaacaggtgcatcaacagacaaacaaagaagaagccacagctgtcctgcatgacttctataccaaatggggcaaggtttacagccatgttatcagaagcttgaaagacatagaaccagatctgctggtcttttataactatcccaagcagatcagagcttcaatttattcgactaacatgattgaatcatttaacaatgtgatcaagcgcaaagctaagcctaaggcagagtttccaactgaacagtcgcttgatgcttttattggcattcaggcaatgagctacaatgaccgttatttcaatcgaattcataaaggctttggtcaggttcaggacaccttagaatcctactttgattaaataaataattaaaaaatcaatttacgagaaagatctatttacacaaaagatttgacagtttcctccttatattaaaaataattaaattaataatactatatttatgtatttgttcaatattttttaatactttacttaaattactgcaaaattaaaagggatcgctcccttttaattagtctacataagcatatttatatgaccattgcgtaccagcagtattatgaatgatgccgtgaactcgcttgttttgcaagtaagctgtggtctgttgataaatcggtgtaatagcctgattactatttacaatcttagctgccgaaatcagatcattccagcgtatgtcaggattattggcgtcttgattgccagcttttttaaccaaattatcgtactcagaatttgaccacttaccgtaattgtaagacgtacctgtcattggaatttgcataaatgtcatcgggtcgttgaagtcgccaccccaatgagagagataaatgtcaaagttgccttgatgtgctcgactggtggttgacttatcaggaatattggtaatatttatcttgattcccttcaattctttggtccattgtgactgcaaatattgggtcaattgatcactgtctgcttcatcatttgaagataaaacatcaaaagtcaaactcttttggccaatctcctgtaatcccttttgccaatatttcttggctagagctggattataatcaactgtatttttcactgcttgttctttagcaaaatctatacctgttttaggatttgcagccaaatcattggcaacaaagccttttggcagagttgagccattgcctaaaacctttttagtcacaatatcacgatcaattgataatgataaagccaagcgaatatttttattattcaaggcctttctattaactgcatttttatccttaaaattataaagcaagaaacgcactaacgaatatggatattgagtaaagtcattattgctcttcaagtttttaacttgctcacttgaaagtggagttaaatccaatttgccctgttgatacaactgataaccagtattgttagacttaactacttgatagtgaatcttgttcaacttgactaccttcttgtcccagtaatcattattcttaacaaatgaccaggtatcattagttccattccatcctttaatcttgaaaggacctgagtagacttggtactgagccttggttgcgtatctattgccatactttttcacaactttttcgttttgcggcccaaatagtggataagccatcaatactctaaagtaagcgatcgggcgatttaacttaaccactaccgtctttttatccggtgcagaaattcctaatgcattaggtgatttctttcctgcaatgattgcgtcagcattcttcacgccactaaaaagataggcatacggagaagcggtcttaggattcaagcttcttttccaagaataaacaaagtcctgcgctacaatcggatcaccattggaccacttagaatcacgtatcttaaacgtccaggtcttaccatctttagatacggtcccagttttagctaagccggctgttggcttaccatttttaccaagacgataaaaactttcgaatacattgccagtttgaccaaatccggtagacttactgatatcaatagtatctagtggagctgtggtgcttaaatttaaagtgccactttgagctgccgacttactactgctattgccattaccacatgctgcaagaagcattcctaatgaaatagtaacgactcctgctaaaactccctttagtttcgacataaattttcctttctcaaacaaaaaaatgggatgtactccaacacggaatacatcccattaagaaccacaactttttaactagttaatcagtaatagtcttaagatgaatcaccacatcagagcatgtcaaataaatgctgtttgtacaacaacattcagtgtattgacattgcatttgacgcttaaacatgtgattcatcatccttcttacttttgataagaataatcataatttattcgatcacgattgtcaacaaaaatctattgtataattatagaaaaatatttggagaaatttttatggaaattataaaatatggtccttacactcttttcacacttattagaacaatcctaacatttatcgtggctattgagcatatcggtatctgtttcttagaaatgtttggtaaacctgaacaacaagctaaggcttttgacatggatatcaattttgttaaacaagaagctgctcaagtttcactagctaaccaaggcatctacaatggtatgttaggtgtaattttgatcattgctttctttattttccctatccctattctttttaacgtatggaaattaattctaagtttaattgtcgtagtagcaatttacggcggattcactgcaactaagaaaatctttttagtacaaatgctacccgcacttttagcattaatttttcttttcatttaaaaatattgcatttttgtagcaaaaaacataagaaaattcaaagctcctagtgataagctgtcaccttgtgattatgtaatatataatatcagtaaacatatagaacataataacgaggtggaattcatgagaaaattttttatcattatcagcagcattattactgggttacttattgggataattggggcaacgatctatctaaatagtcaatcgtcaaaggtaagtaactttaccattcgaactactaatttaacagctcaaccgaaaatgatcagctattctagcaataacctgccacagattaatctctcacaggattccgccgttcagaaattcaaatcattatatacacatgcagtaggtcaactaccttagactgaagtctagggtttagtggcttgttagcttgcgctaaccagaacaccaacttgcttagatacggatttgacttaccagcagtaatcttttgactattgccgatagaggtcgtctaattaccaaagccttttaagtccgcgagttgctagcggactgcagcttttctaggctgcttcttttattttaggattctgccacttgcctaatcctttttctaagatgttcacggccgcattccaatcacgaatatgatgcatctgacagattgggcaagtccattcccgatccttaagggttaatttcttataaccgttttggcccataatactgccacattgatggcatctttgggtggtgtacttaggatcaattgttagaaattctttgccatatagatatgccttataagccagcatgttcaggaaactacgccaaccaacatcagaaatagcttgagacaaggcatgattcttaagcaggtttttgctccttaattcctcggcaactactaaatcgtggtttttgattaatgcagttgagagaacttgtaagaagtcttcacgctgtctgcgaatcttgtcgtgcagtctggcaactgataagcgctgcttttgatagttttttgctagccgcaaattgcgtccttcttttttagcccggcgctgcctgcgagataatactcgttgagcacgagccagcttctttttggctttgcggtaaaagcgtggattagcgaccattgatccatttgaatccgttaagaaattatcaaggttgagatctattccaagttgactctgcgtcttaggcaaggctttaacaaaggcaatatcgctgcctaactgcattgataagtagaattgctcgtcagcggtcttttttatcgtcactgtcccaattctagttgagatatgattaagcaagcgctctttaatcagttttctaaaaccagcaatgcggacaacgcctagcttaggcaatttaatatgcttagcatcaataaacctagctgtcccgttatcaagaaaagcttctggctgcttaggatattgacagttggtctgatatgaccagtcgctgcgttttttatggaaagttgggattccatgaccaatcttacgatagttgttccaagccttctgataattttgaatggcattggcaagagcgaggctatcaatttctttaacacgcaaaaagctataagtatcgcggatattctttggcttagccaatagttcgctattagtgactacttcttctgccaacctagtctcataattattaagaatagaaaaggcaaaaggcattgcttgatattgtctaacagctaagtagcccttagcatgataattacttcgattacgtcctacataagagttgtagacaaagcgctgcgcatcatagtttagcttaatgattttcttttgcttagaactaggataaaagcgaagcttaacgccaaaatgataggctaaactgctcatttttttcatgtgtttcacctcctcgtattatataaattgtaattagtcatattgtgataattaatcaaattagtatttgctttttgatcttcacatgttagcctctaattgtcattggctttggtcaactggtctaggttatcacctcctgcagttttgtctgctttataagtctgccacccagacagttcctttatgctctaactcacatgctgtattgattgcttctttttgctagtccttgagcaattgggattaggtgcagctttcaaagaagcaaccagtgaatacttatactggcgagattgaacttaagaactgtaattaggggttaacatgtgaagatcaaaatctatgatcagaaatttgaaagaaaggaggccatttccaatgaaattatttgtcggtattgatgttagttctaaagatttacaggtcgttgcacttgattcagaagatcaaaacaaacgcttaattaacgatagctttgtcaatgatctttatggtgctagtgaactgaaaaaacaaattttagatctagctcaaaataaacactatgatcaaatcattattggcatggaagctacatctatttacagttttcatcctgcttactttttccaaaatgacgaagatttacaaaagctcaatgtagagactgatgtaattaaccccaaagaaaccagcaggtttcataaagtctttgaagaaagtaaaactgatcctctcgatgcttattacattgctttgtatctaagctttggacattatcgagtaagcattgccagacaagacaactatcttgctttagagcgtttaacgcgtaccagatatgaattagttcaagaactgactcgtaccaaacagcacttcattgaagctttatattatcgggttaataaactaatcactgtcgataaagataagattaatactcctcttttcggtgctacaatgatgtctattgtaaccgatagtaaaactctggatgagatcgcggatatgcctaccgaagacttaatttcttacttacaggttaaaggcagaggacgcttttccgatccagataccttggctaaagcaattaagaaagctgttagaggttcatatcgcttaggcaaagtaatgactgattcaattgatgcagtgctttctgttcattacaacatgattcaaagctttaatgaatctattaaagatctagaaaaagcaattgatcgtatcgttgatgcattaccagaaagcaaaattctggaatcaattcccggtattggcaaaacctatacagctggtattatcgctgagatcggaagtatcgatcgctttgataaagaagaacagctggctaagtatgccggcctaacctggaatcaatatcaatcgggagatcacagcaacgaacatactccaatggccaggactggaaacagatatctaagatattacttgattgaagctgccaatctagcaagattacatgatcctgttttcaaaaaatattaccaaaagaagtatgatgaagctgtctactcgccgcataaacgtgcttgcacattaactgcaagaaaattagtacgagttatctttaaattgctcaaagatgacaaactgtacaggacaccgaggtcttaatttcaaaaattggtctaaatttaaaagtaaacaaaagtttaacattaaaaaaatcaacctttaccaaggcttagtttcatatactcaaatttatgatcaaaaagaacaaatatcatcgcctttcatttgacttattaccacatgacttatagattagatatttatattttacagggaagtcgaacatatgtctctattttttaataaaaaagctgactgctaggtcagcttggtcctatccatccccacattaaaatacggggattttcgggcgtttttcattaaatcgatcacacttagtttaagtaaagatatctatgtttatgacatagtaggctatgatgaccgtaaagactgtactattcaagttgacgcaactaataacaagattctaggtcagtctacgcaggtgcttgattatgactacgaaaaagatgcgtctttgaacctaaaaaagacaatttcacgccaagaagctaatgaaattgccctaaaagaattcagtggaggaacaccgatttcatgggaattaactgatgacaataatcaatcaatttgggaagttaaaatgatccacggtaaacacaaacataccgtaaaaattaatgctagaacaaaggctgtaatctaaaataatccccaacttatgcacaagttgaggattattttcttatcttttatctaggttgactatctgcacgtgacttgtaatcaccgttttcagtaccaataattagcttttcgccattcttgataaaatcaggaacttgcacaactaagccagtttccatagtagcaggtttaccaccaccagctacagttgcacccttaatctctggttgtgtttccttaacggtcatttcaacagttgatggcaattcaataccgataatcttgttatcatctgtaaagtccatatcaaccataatgttaggcatcaagaacttaacgtcatcacccaattgatcagctgaaacttcatattgatcataagtatcagtatccatgaaagtataagtattaccttcgccgtaaaggtattgagcctttttcttagttacttcaactaaatccactttttcagttggacgcatggtcttgtggacaactgcaccactcttaacgtcacgcaaatccatttgcataacggtattacccttacctggcttatggtggttagcctttaaaactttgatcaatttgccatcttggctaaaaatcataccttttttcaaattaattgcttgtaccattatttcttctccctttaatttaaacttacctttcgactagtttaaacacgctggaggcaaagcaaatttttttatcaacagtaaataaatcgtattcataatacctagtataccaaattagatgtgccgcaggtatatccgatcaatcaaatgtccgtcagtcttatgcaaaatcaggctagcacgttccttggttggcgcaatatattcacgcaagttgaccagattaaccatctgccaggtttcttcagccaattgaattgcatcttccagcggtccattagccattttatagtaaaaattatctggcttatttttatttaatttaagtacttttctaaagcgttgcatgtaccatttttcaatcaaatcttcttcagcgtcaatataaattgaaaaatcgaaaaagtcactagtcacaacttgtccactctcgggcaattgcaatgtattaattccttcaataatcaatacatcaggattttttacatgaccatatttcccaggtactatatcgcttaattcttgagaatatagtggataaacgatatccttctttccacttaaaacgtctcgtaaaaaatcactgagcaaagtcatattgtaactttcaggaaagcctttgcgaggcattaaattacgccgctttaattcctcattagggtaaataaaaccatccgtggtcatcaagtgtacctttaattctggataggttctactgagcaacaattgtaataaacgcgcagtggttgatttgccaaccgcaaccgaacccgaaataccgatgataaacggagctggtgaaaaacttttatgcaaaaatttgatttgtgctttttgcgcattctttttttgttggtaaactaagtgtaagtaactgatcaaactggtatagatctcatgcacgtcggttaggtcaatcacgtctcctaaagacttgatatcagctaattcttctttggtaatattgactttatctaagggagctaatttagcccattcatttctgttaaaactcgtataatttctcatatatcgtatccatattccttctaaaacactaacttattataatagaaagcgctaaaaatatgaaaaaaataatcctattcggcgattccatttttaacggatatcgtaatggtcaaaatacaaacctagtaactaatttatttcaacaggcactaattaattatgcacaggtggaaaacatttctaaaagcggtgctaccacagttgaaggcgtcgattatttggagcaaatttccccagaacatgatctagttgttgttgaatacggcaataacgatgccgcaacagcttggggcattagtccagaaagctacgaaaagaacttggctcaaatccttagtgcagtaggcaaagccattgttgtgggattgtgcaatcccaatccagaaagtgacatttttcaatattatggtgctgaaagactcgatctttttaacaatatcgcccaaaaagtcgcaaaggcacatggtgcacaatttgtggatattttacctgcaatgagaaacttaaaagacaaatcgacatattatcaagccgacgggcaacatttaactgatcaaggaaatgagtttttagttaatcaaatcgtgccagtaatcaaaaaagacttagcctaagccaagtccctcttcatcatcacatgttctacgccgccttcatcaaacggttcgcctacaacttgatagcccaagctatcatagaaaggctttacccgcatttgggcgtgacagtaaactgcatcaatcttattttgccgtaaaaatttatgcacagctgtaatcattttcgatcctagctgttgtccgcgcgcttcttttgacacagcaacgcgtcctagcatccatttaccatcttcttgaaacagacgacaagtcgctaaggcagtcgtctgtttttgattgagtaaataaacctgaacagcaattaggtcctcatcatctaaatctggtagagttatcttctgttcagccacaaaagtcgtgttgcgcaatctttctacgcaatagaattctctagctgtcatttcatcaatctttttaaaagtaaaattatctatcttcatattacttgcctaaccaactattgtttctgccaaaccatttttcattaagtttacgcaattgaccatttttttgcaattttgctaaaccttgattgaccttctgacgcaaagttttgtctcccttacgcatccccacagcgaacaagtccattggcacgcgatcattctgaattaccttgtattcgctacttttagccatgtgagcaatataatagtcggcataaacttcatctaacagaattccttgaattcgtcctgcattcagatccaagaacgaattagaaatcgtatcatataaaactgttttcttagcatgcagcacatcttgtttagtttcataccactgctctgctgttgaaccagtttgcattcctaattcataattcttcatttgtttaaatgaactaatgtcactatcttttttcacaactaaaacctggcgattacgtaaatatggcttgctaaaagctacttttttctgtcgttctggcgtaatgctgtaaccattccagagtaagtctatcgtaccgttacgcagctctgtaacgttcattgaccaatcaatcgtttgaaaagaaaccttaatgccatattgtttaaagactgccttagctaagtcgatgtcataacccgtcaattggccgtttttcttttcaaagcccattggtacaaaactatcgtctaagccaattaccacttgctttttgctggcaatcttattccatgtatcttgagtattagcttctttttgtacgctttggcaaccagttaaacataatgttaaggccaagacgatacctaaaatccattttttcattgcctaatcctcgcttaacggtcgaaccttgagcatctgatccgccacattctctgcaaaattcaagtcgtgggtgataatcagctgggttaaacccgatttttttaagcttaaaatcattttctcaacttccttacgtaaatttggatctagcgcgctagttggctcatcataacaaagaatccgcggtttcatagccaaagctctagcgatagctactcgctgtttctgcccacctgataactcataaggatactgctgttcacggccacttatttgtagacgttttaacaatacacgcgcatcctgctctgcttcagttttactcttttttaataccaaagtaggtgccaaagtgatattttgtaaaacgctcaaattaggaaaaagattataatcttggaaaacaacgccaaccttgcctgaatcataaggtttaccgtcaatcaaaatttcaccagaatcttttgtttccaaaccggcaataattcttagtaaggtggttttccccgctcctgatggacctacaattgtcataatttctccgtctttcaaggtaaaagagatgtcacgcaaaattcggtgaccgttaaattctttgctcaaattttttacttctaacatattctcacctcaactacttgtaataagaaaagtatttttccagctttttcaaaacaaaagcacaaatactgatcaacagtagataaattacacctactaaaactaacggtactagcgttacgtctctggccattgccacattgccggccctaagcaaatcacctaaaccaatgacataaactagcgatgaatcctttaccaagttaattacttcatttccaattgaaggcaaaacaatttttattacctggggaataataatcttggtcatcgtttgccagcggctcaagcgcaaaactttcgctgcttcaaactggccttcatcaatcgattggaagccgccacgaaaaatttccgcaaaataagccgcataattcaaaacaaaagcaaacaaggctgcttgatagcggggaaagacgatatgaataattggtaagccataaaagacaaagatcaattgcaataataagggcgtgccccgcataatccaaacataaaagttaaccaaccagcgtaatggtttaaacttacttttttcacctaatgagaccaaaattcctaatggcgttgctaaaattaacgtccagaaaaaaatacttaacgtcatgcctgctcctgacaaaagagcgggtaaaatttctgcaatatattttaatgacatactctcaccttcatttttctttcctaataaaaaagccctcttaggattaacctaagaggacgactgctcgtgattccacctcatgttcgcacctgctcacgcagaaatgcctcactaggttgatcattttaaaagaaaaaccctcatagccaaacggctacgagggcgaatgtaatcgcggttccacctcatgtttacaaattgctcacgcaacttgcctcaataagttcaataatcaacctttagctataacgggctatcccggattttcctacttttgttcagaagaccaactcacagatgtgattcatactagcaaatatcttatttccaccagcaaagactctctattactttgactagtattactatttctgttctaagttgtttttaatgttgaataaatcttaaatgatctagcaacttttgtcaattatttttcttcataagtatctggatcaacatcaagcaatggactcttttctccagtataaataatatctagcttatacattgcacgagaggtaatagtataaacaagttgagtttcatccaatttatggtaagcagctttagaggcatcccacatgactaccgcatcaaattctagtcccttagccaagtaagaaggcacaactagagtaccatcaactagtcgctgattagcagtcgcaattaaggtcgtgttttcaccttttttagctaattcttcatgcacaaatttagctgcagctaagtctttggtaataacagctgtcgtacgcttattttgttcattattatgcaaaacgttaactaaaacatcaattgcttcatcatcgttttttctgccccaaattataggcttaggacctttacggttaaaggcttcaatcttttcgccttgacgcaaaatttgcttggtgaaattggtcaattccttagttgaacgatatgatttcgttaattgcaccacatcagttttttcaggatcaaataagccagagatctgcttaagtaagctacgactttcatccttagtaaaaatagcctgattcaagtcacccaacattgtaaacttggcccgtgggaaattatacttcaagtaagctaattgaaatggagtataatcttgaatttcgtcaatgaaggcataacgcatctcaaagtcagtcctgcgaccagtgatcatgtcatacaaatataagtaagctgaaacatcattcatggcaatatggtgctgcttaaagttattcttaacttcttccacatgagccaaccaatcattttcatcaatattccacttagatagatcaaccatcttaggtacagctcgcaaaaagctcaggtattgtgctcgcatattcaaaaagtggttgtgcaaaatacgcttatgcacgcccttcaaggctgataatacaatttttctacctaaaaaggcctcttccttagcctcagactcaaattcttgatcaggtcgatcatataactcatttaattcagattggctcattccttcaatagcgtgtgccacccaagccttcttagtttctggcgtaatctttcgattcaacatcttgatcaattcttcacgcgttgcatcaattcggttggccaacttgtaattttcattgaaagaataatagatctccttaattttttccttatcaaagtaaggtttcttcttatcacggaaataaatattcttaaaaataacaccgcgcttattcaagtgctctgcataacgagtcaacaagttaaagaaattaactgaatccttaaacttagaaatattgctgtctgcggtttgatcttcaaactgtctgaataagttttcaacttccatacctggcaaccgtcgcgcaacaaactgccagtaagtcatttgaaccatattttgttcgcccatttcaggcaaaacattcttaatatagtcattaaacaactggttaggactgaacatgattacatcacttgaagtcaggttgccacgataacgataaagcaaaaaggctatccgctgcaaaatcgcactggttttaccagaacctgccgcaccctggacaaaaagcagatctgctttggtgtttcgaataatcttattttgttcgcgttgaatcgtcgttacgattgacttcatctgcgttgatgatttttctgacaaaacttccaagagcatttgatcaccgattgactcatcagtgtcaaacatgttcacaatcttgccatcttcaatcataaattggcgtttcttagtcatatcaactgtaatttcaccttcaggcgaattataagaaactttacccaatttaccatcataataaattgaagatattggtgcccgccagtcatagatcaagaagtgatcgtccttgtctgcaaaagaacctagaccaatataaatcgtctctgttcggtcctcatttttttctttaaaatcaacccgagcaaaatatggtcgcttctctaaacgctctacagtctctagctgcttagctgaatgttgccaagcatgttcacgttcactcaataattgttgctgctggtggattgacagtgctgtttccattgaagtggaataaccatcataatccaatttaacatcgtcaaaaaagtgtgaattaagctctcttgcttcgccttcagctgatttgatagatttttttaaagttttttcgcggtccttgatctgacccataatattatcaaggtgcttttgttcaagttctttttcgtttttttcagttttggctgtagccatctaatcaccttttctttaaaaattcgcataccattttaccatgaatagcgctttcataatagttttcctgctcgtgagaaaaatataaataaaaattgatgaaaactttaactttagagactataatcttgacatattggggtgatatatacatgaaaagattttttaaattactgagaaatgttctcttgcttgctcttatcgctcttggcgtttggacttatcagaacaatcccaatattcgtatcgcaacgcaagactccctagctacacttagctatcgaattaacgaacttctaactaacgaaacgaccatttctcccaataacgaaaaaaagactactaatatcaaaactgacacagataaaacagaaaatgacgattcttcagacaatcgtgtatggtcaaatcctgaagctaaggtttatatcgatattagcaataatgctcaactaagatcagctgcagtcaatgcaatgaacgcttggaatcgtaccggtgcttttacttttcaccaaataaatgataaaaaagacgctcaaatcgtcattaatacagtcgataatagcgacactaatgccgcaggagaaacagcaactacctataaccctgctacaggacatttgttaaaggccacggtcaacttgaaccgttactatttgcaaaacgaatggtatggttacagttacaatcgaatcgttaatactgctgaacacgaattaggccacgcaattggcttaaaccacactaataatgtctcagtcatgtacccaaagggttcgatctatacgattcaaccgcaagatattaaaactgttaaaaagatctaccacgaaaataattaactttaaaagctcacctcttttttctacaataaagtgtgagctttttacgaggagaaaaatatgaaaagaatttatatcgtccgtcacggtcaaacttatatcaatcgctacaataagatgcaaggttggtgtgacacaccattaactacaccaggaattgaaggcgctgaagaagctggtaaagctttaagcgaagtaccttttgacattgcattgtctagtgatcttaagagagcaagtgatacctgtgagatcatcatgaaatataacgccaacaaagacgaattgcagcacatcgctagtccatttttcagagaacaattctacggctacttcgaaggaatggattccgaaatggcttggcgaatgattggtggcagtcacggctacggaacacggcaagaaatgtttgctcatgagagcatcgatactattaaggattggattaaagaagccgatccttatcaccaagcagaaaacgctgaagaatattgggctcgtcttgatgatggttttaaattaatcagtcaattggatggcgctgaaaacattctgctagttactcacggcttcactattagaagtctctggtatcgttatggtgaccatattcctttggttccaggtcctaagaatgcttcaatcactattatgacaatgagtgagaaaggcgaaattaagatacctaagtggaatttaatgcatttatagcaaaataagattaggcgaatcgggcctaatcttattttgtttgtttcccggatttaaaattgaagtgcaacactaagtgttaaacaaaaaggccatgaagacctaaacttgaagtgacgaaaaatcaagaaaggaagatcttcatgaccaattcaaattctagcatttctaagcactatcatcaattaaccagcgtacaacgtggacaaattcaagcaatgctggattccggcataacttcccgtactgttatcgctcaagaagtcggctgccataagtcgacaatcagtcgcgaaatcaaacgcggaagcgtcctgcaaagagacagcagctatttattgtatgagcactattacgctgatactgcacagatttattatgagaagcgtcgcaaaaactgctatcagcgcaatccattgaagcattatgctgtctttttgagaatgctctccagacgctttaaagctaaatttgatgccaccagcatcgatgaattcgttggtgaattcaaaaggactatgccaggctacccttgtcccagcacaccaactgtctatcgctatattgatcagggcttgctggacataagcaatattgatctgcctatgaagctcaaaagacgcaggaacaagcgtcatcacggccatagcggtcatgctttgcacaagaagcatcttggcaattccattgaacagcgtcctaaagagattgaagacagaaaaacgccgctgcactgggaaggagatctggttaaaggcgtcagacgcaagaatcagcctgctttaatgactttgaccgaaagaaccacacgctttgaagtagttatcaagattcctgactatcgggcaagcacatgccaaaggctgcttcaaaatgagattgacagacatcctgcctggtttaaatcgatcacgtttgacaatggctctgagtttgcggatatgaccaagatcaaaggctgccagatctacttcgcccacccatattctccatgggaaagaggcaccaatgagaactgcaatggacttctgcgtcaattcttccctaaaggcaaaagcatgaaagataagtcagctgcttatgttcaacaggcaactgatgccattaaccgcaaacatcgtcgaatccttcaatatcacacagcagaagaactcttcaagcaatatatttcctcatagcctaactgttgcacttaatttgacaattcaggattttgtttgtttaattatttttgcaaaacaatatttttatatagcttcactgttattaaaaaacttcctgaaactgtcaaatcttttgtgtaaatagttctttctcgtaaattgattttttaattatttatttaatcaaagtaggattctaaggtgtcctgaacctgaccaaagcctttatgaattcgattgaaataacggtcattgtagctcattgcctgaataccaataaaagcatcaagcgactgttcagttggaaactctgccttaggcttagctttgcgcttgatcacattgttaaatgattcaatcatgttagtcgaataaattgaagctctgatctgcttgggatagttataaaagaccagcagatctggttctatgtctttcaagcttctgataacatggctgtaaaccttgccccatttggtatagaagtcatgcaggacagctgtggcttcttctttgtttgtctgttgatgcacctgtttgaattcgttcatgatcttttcacgatcgtcgacgcgtactttagcgcagatattgcgcatgacatgaaccaaacagcgttgaaaatgagctttaggataagtcctggccaaggctgttttcatgccaacaacaccatcagaaagaaagagttcaacttgcttcaagcctctggacttcatgttttgaagcatctctgtccagacttcaatgttctcactaggagcaatgcagtagtcaatgacttccttatgtccattaggtttaatgccaatggcaatatagactgcttcacgctcaacgctcaaacgtttctcggcgcaaaggaaggtatgtcgcatccaaatagacgcagaaaaacttgtcgcttagcttgcgtttgtggtaagcctcaacctttggaatcatctgcttggaaatatttgatacctgagctggactgtaatggctgccatacatcttttcaattagatcggctatttccctggtggtcacgccattggagtaaagcttgataatcatgctttccaagatatccgagtgctgcttgtagtcaggcagcgtgtgctgatgaaattgaccgttgcgatcccgaggcacttgcacttcaattgggccaaattgcgtatcaactttgcggaaataagcaccatttctagagttgccagtattccagccatttctggcatagggatcatagcccagaaaggcagtcaattcagcttctagcaagttattaacagcctgttgtagttctttgcgcaataaatcatttattttgtctggattgaatagagcttgagcaaaatctttggtaaaatcattcatgaaggagttcttctttctgtatgtgtttttttgttcaaaccaatcatacgagaaaggaactcctttttctaatgtttaaagaaataaatttaaggaatcattcatccttacacaaactattttacagtctcaacttcctactatttttaacagtaggaagtcttactctaactaatctttagtcacttgttttagtttttattaacttacagtcgcccaaagtctgaatcaattgtttgccatctttttggtggaaaacagcgttttgatacgacaatcgttctttctttttactcttatctttatactttttaataaaggttacttcatagttaatccgactataattacgcttacctggtaaaacagagagcaccttgatctttacacttaatttcttgatactcttctttttatgccattcctttagttgcttagcaatcttcttatagtctgcattttcttttccattttcaaagtcatctgcatttggcgacttaagggtgttgtacaatagcttagctgcatccccaaccttaatcaagccaggccaaatcgggttaacaatatagtcaccttctgcatcctgatagacatctttttcgccattgccttgatattcagcagtaccatcataatcagtgacgtcatcctcactattagaaaattctgaactaatcgactgcgacaaatccgttaccctttcggacttaatagtttgaccatctgccttactcttaatatagatttccattcgcttagcaatcggataatccttgaaagtatagctaccatgctggttcaatttacccgccttacgatcattgatatagatcgtaccattaggaacgctgcgcacttggaaagtggccgttttgatcttcatatcaacagtcttatctgaccaaatgttaacaatcgaatcagcatctaaatggcgaccattaaccttagatttaactaatatatgatagcgaccaggaaagaccatacctaaatcttgatagtaattctgattgccaccttccatttcaccataatccttttggttaaccgtcaaagttgaattagcgtgattggtcttcacctgtgggcgatatacttgtatccacaacttatattttggaaaaagcaaaaaattgcgtccatcttgaatcagtctgatttcaccatgatcgcgattatgacgcaaattataggctaaacgtttagctgcactgtgatgctctttaaagtaattttgaagcggcttcagcgatttatctgtcacatccatatcaggcgttgaagccgtgacatactgagctagctcagttttaggatcctgcattttagctacaatgcggtcaatttgacgttctttagtgtaataaaaattgccaattagccatgcaataccaattaacaggataataactcccgatatccaaattttcttatgttttttcattgatcaaaacaccttttcacaaatccttttaacttagattaacaagttgatcaaaaaaagcaaacatcttttgttcacaaatcaagacgaagttcttattatatttagtagcattattttattttggaggggattgcacagtggaagtaaattttgattttgtaaaaaatagcagcttcaaggaagcctttcctaccgctgaaaaaatccacaaattatacacaattgatgattatcgtgacgttatttcaaattcacgtcttctattagagagtctaatcaaaaaaatttttaagttagaaaatctcagtccatattacacagttcatgatggcgaacaccgtaatttgcgtaataatacacattatttacgcaatgaactagattaccctctttcgatcatggatttatttgacgaaatacgctgcatgggcaacgctgctgtccacgataaccaaattgaaccagatcaaaagcaagcctggcactgtatttgtgatttacacgatattcttgtctttttaattaacagctatgacggtcaagacctatattatttgcgtcccgatattgcgatggaagcacaaactgatgaagaccattattatgtgcgccaaaataagcaaccaaaaataatgaaattgcatgatcatcaaaatactaagaaaaaacagtccgcatctgcaccaaaaaaggcgaaacatgttaaacatttttccagtaaacagcatatagagcaaactaactctgagtcacaaacgaaaactactccttccactaaagacaattggttaagaaaaattaaagaactctttcaccatgattagtcatattgacactatgtcacaatatgataaactatatattatataatttacataccgagaagcgcctatgacgctgccgatacgcaaatgaaaactgaacaagtttctcaaatggggaacggcttatgctagtaggtcgttttccattatttttttacgaaaggagtggttagtccgctatggataatcacaggcaaaaaccttgggctgtcgaacagtctgaggtattaacaaatacaaaaacaaccgaaactggtttaactgaagacgaagttcgaatacgccagcaagctggtttaaacgagctcgcagctaaacctcttaaaacagtaatccaaatggtcaaagagcagatttttgatccaatgatcggtatcttattagtagctgccctcttatctgctatgtttggcgaatataccgaagccattattatcgcgacaatcgtggttcttaataccattattggagtagttcaggaaaagaaggcacagtcttctttagctgcgttatgtgacatatctgcgccaactgcccatgtaattcgtaatggcaaagaattaatcataccggccaaggaattagtagttggtgatattgttaccttgcatgatggggacatggttccagccgattttcgcttaattgaaacagctaacttgaaaattcaagaagcatcccttactggtgaatcagtaccggtagaaaaagacgcagctgctgttttaaattcagattgtgctcttggtgaccgcatcaatatggctttttcttcctcaattgtgacttatggtcgtggtcaaggcgtcgtgacagcaattgggatgcaaacagaaatgggtgccattgctggcatgttagaagatcaaactgaagtacaaacaccattgaaacgcaaattagctaaagccggcatggtcttaacgactatcggcttaattatttgtagtttggtctttgcaattggtgctttctatggccgtccacttttaccacaattcttggttgctatctcattggcaatttcaattattccagaaggtctgccagcaaccgcgacaattgttatggccttaggcgttaaacgcatggttaagcgtaacgctttgatcaaaaagctgccagcagtcgaaaccttaggtaacgccactgtcatctgttccgacaaaactggtactttaaccttaaacaaaatgactgttacacaggcagcaacgaatgacttcagccaaagtcacgtagttgaccagcttgcagcaaacaaaaccaatcaaactttggcctatgctagcgctctttgtaacgatgccagcttgaacggtgaaaaagagattggtgatccaactgaggtagccttaattccttttgcccaaaagcttggctttaaccaatctaacttaaagaaagaattcccccgtttgttcgaacaaccctttgattcggacagaaaacggatgacaacattgcacaaaattgacggtcaattaacggtcttcactaagggtgcaacggacgaaatgttgccgttatgtacacacattatgactgacaatggcgtgcgtaaaattacaccccaagacaaaaagcaaattgcccacttgtctcaccaaatgcaagctgacgctttacgagtactaggctttgctaccaaaatagtggataacttacctgaagcaaatgctgatttggaaaataatttgacttttatcgggattgtcggcatgattgacccaccacgaaaagaagttgcagcatcagttaaaacctgccgtgaagccggtattcgcacaattatgattaccggtgaccacaaggtaactgccttggcaattgcgaaaaagttaaacatttatcagacaggtgacttagcaatctcgggaactgaattagaccaaatgtctgatgcagaattagatcaagctgttgaaaaggctaccgtttttgctcgcgtttctcctgctgacaaactgcgcatcattcaaagcttaaagcgaaattgtgaggtaacagctatgaccggtgacggagtaaacgattcacctgccttaaaggctgccgatatcggtgtcgctatgggtgtaacgggtacagacgtggctaaggacgtggctgatatgattttgcttgatgatagttttaccacaattgcgcacgctatcaaggaaggtcgccgcgtttaccgcaacatccaaaaagtaattcagttcttgctagttggtaacattgctgaaattaccactttgtttgcggcaactatttttaactgggatgcgccattattggcagtacacatcttgtgggttaacttagctacagctactctacctgcccttgctcttggcgtagacccagcaagtaaaaacattatgaaacacaagccagttaaagctggtactttattcgaaaaagacctagttattcgggttattacccaaggaatatttgttgccctgcttactttaactggttacttcattggtaaagaaaccggcaatcaagttgttggacaaaccatggccttcagtattttagcattggcccaaatgattcgttcatttaaccagcattcaaatactgatcccatctggaaaagatcatctggtaataatccatggttaacagtgtcattcattatctctgcatttttcatgggtattattctctttgtcccagcaatgcaagatgcatttcacattaccagtttgtcagctggacaatggttaatcgtagttaccctagctttactttcaattgcacaagttgagttagtaaaaggttgggcaaagtttagaaatatttttattaatgacaataatttaattgaagattaattagttacaaaaagacggtagtacaacactatcgtcttttttgatattaaactttggctgctgccaattggtcaacatctatctgactacgaccaatctgaattgccttttcggtactttcattcaagctagcattgatcatcttatggctaagctccagcaccattggcaaattaacaccgctaattacccgtactcgctcaggatacatatcttcatattccgaagcgactaagtggggtgtcccattttttaaatcagttagcaccaaaatctgactattctgatatttattcatgactttagcaaaacgagccttaaaatctctgattcctgtgtcgtttaattcaattgtcaggatctgatcattcttgcctgccaacatatcatgtgcagacattagccccgcagccaacccttcatgagttgcaattaaaagttccataaaacgcacctctttgtaagcgatttctatagaaccattttaacatatttttgtattaattaagctgttcaatatctgctaataagctactttgttcaggtgttagccgctcatccttttgccgtaacttaagtacttgtagacaagtgtgcaaaatcttttttccttgttccgtcacttgtttgccatccatatcaggcgttacactggctaaaaagtcatccatctcatcagcagtaaccttgaaaacatcattttctccatgaatcaagggcatccgattgagcatttcttcaatcatttgtaatttatttctagcttcttcaaaatctatcttgttcacatccaattctttttcttttattatacaaaaaaacagccacctaagtgactgtcatctttatttcgtattaataattgcgtttgaaattgtagttgcattagattcgatcagttgatgtgaattattaataaaaagggaagccccaattcctatagcagcaaatacaagccaaactttctgtaaaactgtactcttcatgttcccagctccttatatttcttattatataaaaagccgatcgttatggggatggctacgcttacaattaacataattgtaatattatttacctttacttaagagttacttctccagcaacatttgtatcaaaaaagtcagcaatttgatggacgtccatcccttgccctaaagcccacattaatttggtaatcgcactctcagaagtcatatcacaagcagaaatagctccttccagtaaagcctcacgccccacctcatatttggtcaaatcgctacgttcatacaagcattgactgctggctacaacgggaataccttgacgaattagcataccaattgcggctaccatgttgcggcgaataaagttcatcccgcctagaccatatgcttcaataacaattccacggcaaccactattaaccatcgcaaaaagcagattaggatcaaagcctggaaatagtttcaccaacgatacgtgtgaattaattttggtattcaaggttggctgaccgtcatgttctctttgaaaatgttctgaattaaaaactaatccatcggaagaaacggttgctactggtggcacattcacactttcaaaagcatcaaagttggtagtccgcacctttacactgcggcagcccagcataactttattatgaaaggctaaataaacatcaggtggacaagttgctgcagctgcaaaagccaaccgtaggttatcgtgagcgtcacttaggaccacgttaattggtacctgacttcccgtcagcacaaccgggatattaatatttttcagcataaacgacaacattgatgccgtataagccatagtatcagtaccgtgtgaaacaacaattccatcgtaatcattgcggtatttgtagatattttctgcaataaatttccattcttctggttggatattagaagaatctaattgcaaaatatcgcggacttgaatgtcgtacggcaactttcccaacattttaattaactcttcaccggtttccttgggtactaggcctgcatcagaagcaacggaagcaatagttcccccagttgatagcaataatattttcttcatcttgttcccctttatctcaaatcacaatgtcgaccataactattcatgattagatcaattaaaacataggccgaactaaaagttaccgcattttgcttactaaattgaaatggcgtagttttgaagaaaaagctatagtcgctaagagaggctaattttcccgtttgccagctagtcagtgacaccaatttcagttcagtattcacgacatcaatcttcttaagttcttcaataattgttttattaaaaccaccaaatgaaataacaaacagcatgtcattttcccgtgcagaccgccctaataatgccacttcgtcgcgtgcactaggcaaaataattgcttttttaccaattaagaaaaagttatgcgccaaatattccgcgataatttgctgctgccagccagtagagtaaagatagatcgtttccgcttgatctaaatccgcaaaaaatggttgtaagtttaatcccttaaaatatttaaaagtttcagcaatgatcttttgtaaatccgtattgaaatctagcgtttgcttgttcttaacgttttgctcctttcgtgtagctaactcggacaattcaaatttcaattcgctgaaaccgcttaatcccaattttttgcttaggcgaaaaatagcggacttagaaacgtataatttctgagctaattccagcaaactcaactgacttgctacttcaggatatttcaataaatagctaacgatcgctttatcggtctcattaaaactttcctttttcttcatgaccgctgtttctaaatccattctgtttcctttctcatcactgtttcttattaagaaaagaatatcatgtcgtactcaaaaaaggtagccaccctatttgagtaactaccttaatttttattcttgaattgaagttatgttatgacaattaattatttaagttctggccagtatggagcattaactggaatcatgtcatccaaaatcttcttagcaacggaagcatctggtacagtcttgtttaatgcaaatgcttgcagcatcttattgtatgaatgttcaacataagcatcaacaaccaatttttcacaagtttgttgttccatcatcaagcctctttggaagcgacctgctttacccgtagccattggttgaatgccatcagcaccaaacaatgctggtacttcaacaattgaatctggatccatattagaaattgcaccgttattagcacagttagctaagaacttttcatgagtgttaaatgcgatcgcatgacaaatatctacgatatattcagagtgcaaacctgaaatatcccaaatattattcttagcagttcccacctttacgattctttcacattcgccaaagacaatcttttgccggtgttcacgaatttcatcagtacgagtatgcttcggatcagcattagcaacttcatattgtgggaagtagtagtattgcatgtaattgtttggcaaagtttctggctctagcttatattcatcggcaactttcttaaaggtggcttcccaagaagcttcagtatccttgtcgtaatcgccacctacccaatagccgtgctctttgacatattccttcaacttaggcattaagtcttcgccagtcttcttgttgcgaacttctttccaccagccaaaatgattcaaaccataatagttaaagtcaatatcatgccaactgtccaaaccacaaatggcagccattctgtccatatcatcaatcggcatatcacaaatgttaattaccttagcatttggacgaagacgacggcaagcttctgcaacgattgcaattgtgttggagtagttgatcatccaagcatttggtgagtattcttccatccaatcaataatttgcaaaattgcgggaattgagcgaagaccataggccattcctccgggtccagtagtttcttgaccattcacgccatattttaatggaatcttttcatccaagcttctcatgtgatatttaccaacacgaattgatcccataacaaaatctacatcagtaaaggcctctttaggatcagttgtgtaagaaaacttaatttgaggtgctctttccttcatgataatttcaacagctttggcaatcttttcttgccgttcagcatcgttatcatagaacttcaactgtcttaatgggaatttatcctgactcttgattaaatcaaggacaaatcctggagtaaaagtactaccaccgccagcaataactactgaatatttcttaccatccataatctattttctcctttaaataaaactaagtttttatctctgtttcatttgccttacgcatatatttatatcatcttctcccacaaatgtattcgttttcaccagcttcagactttgtttcaagttttggaacgcgtttcactacgcgaaatatttttaaattttgccttaagcctaacaaatcaggtgtttaacttgcctttattagtaatagtgtaaaaatgaaaaaaataatcgtttcatgaccaagataaactataatttgaacattcctttaaccacaaaaataaatagtccgtatttgatgatcgtatagttttaatgaaactgtcaaatcttttgtgtaaatagatctttctcgtaaattgattttttaattatttatttaatcaaagtaggattctaaggtgtcctgaacctgaccaaagcctttatgaattcgattgaaataacggtcattgtagctcattgcctgaataccaataaaagcatcaagcgactgttcagttggaaactctgccttaggcttagctttgcgcttgatcacattgttaaatgattcaatcatgttagtcgaataaattgaagctctgatctgcttgggatagttataaaagaccagcagatctggttctatgtctttcaagcttctgataacatggctgtaaaccttgccccatttggtatagaagtcatgcaggacagctgtggcttcttctttgtttgtctgttgatgcacctgtttgaattcgttcatgatcttttcacgatcgtcgacgcgtactttagcgcagatattgcgcatgacatgaaccaaacagcgttgaaaatgagctttaggataagtcctggccaaggctgttttcatgccaacaacaccatcagaaagaaaaagctcaacttgctttaagcctcgggatttcatgttttgaagcatatctgtccagacttcaatgttctcgctaggcgcaatgcagtagtcaatgacctccttgtgcccattaggcttgatgccaatggcaatatagactgcttcgcgctcaaatgtttctcggcgcaaaggaaggtatgtcgcatccaaatagacgcagaaaaacttgtcgcttagcttgcgtttgtggtaagcctcaacctttggaatcatctgcttggaaatatttgatacctgagctggactgtaatggctgccatacatcttttcaattagatcggctatttccctggtggtcacgcccttggagtaaagcttgataatcatgctttccaagatatccgagtgctgcttgtagtcaggcagcgtgtgatgatgaaattgaccgttgcgatcccgaggcacttgcacttcaattgggccaaattgcgtatgaactttgcggaaataagcaccatttctagagttgccagtattccagccatttctggcatagggatcatagcccagaaaggcagtcaattcagcttctaacaagttattaacagcctgttgtagctctttgcgcaataaatcatttattttgtctggattgaatagagcttgagcaaaatctttggtaaaatcattcatgaaggagttcttctttctgtatgtgtttttttgttcaaaccaatcatacgagaaaggaactcctttttctaatgtttaaagaaataaatttaaggaatcattcatccttacacaaactattttacagtctcgttttaattacaaaatacgactcaaactagtttcacttccatattttgtagtgtaattttgaaattaattataattttaatatctttctgctattttctatacaatataatatttttaaaacatatctttgctaaacgctgattttagaaactgtcaaatcttttgtgtaaatagttctttctcgtaaattgattttttaattatttatttaatcaaagtaggattctaaggtgtcctgaacctgaccaaagcctttatgaattcgattgaaataacggtcattgtagctcattgcctgaatgccaataaaagcatcaagcgactgttcagttggaaactctgccttaggcttagctttgcgcttgatcacattgttaaatgattcaatcatgttagtcgaataaattgaagctctgatctgcttgggatagttataaaagaccagcagatctggttctatgtctttcaagcttctgataacatggctgtaaaccttgccccatttggtatagaagtcatgcaggacagctgtggcttcttctttgtttgtctgttgatgcacctgtttgaattcgttcatgatcttttcacgatcgtcgacgcgtactttagcgcagatattgcgcatgacatgaaccaaacagcgttgaaaatgagcttttggataagtctgagctaaggctgttttcatgccaacaacaccatcagaaagaaaaagctcaacttgctttaagcctcgggatttcatgttttgaagcatatctgtccagacttcaatgttctcgctaggtgcaatgcagtagtcaatgacctccttgtgcccattaggcttgatgccaatggcaatatagactgcttcacgctcaaatgtttctcggcgcaaaggaaggtatgtcgcatccaaatagacgcagaaaaacttgtcgcttagcttgcgtttgtggtaagcctcaacctttggaatcatctgcttggaaatatttgatacctgagctggactgtaatggctgccatacatcttttcaattagatcggctatttccctggtggtcacgcccttggagtaaagcttgataatcatgctttccaagatatccgagtgctgcttgtagtcaggcagcgtgtgctgatgaaattgaccgttgcgatcccggggcacttgcacttcaattgggccaaattgcgtatcaactttgcggaaataagcaccatttctagagttgccagtattccagccatttctggcatagggatcatagcccagaaaggcggtcaattcagcttctaacaagttattaacagcctgttgtagctctttgcgcaataaatcatttattttgtctggattgaatagagcttgagcaaaatctttggtaaaatcattcatgaaggagttcttctttctgtatgtgtttttttgttcaaaccaatcatacgagaaaggaactcctttttctaatgtttaaagaaataaatttaaggaatcattcatccttacacaaactattttacagtctctacttttctactttttaaagctgttaaaatatctttaattcttatattatattctctacccaatgaatatggcttcacttgttcaggtactgaagctatagaaactttctctcttgacctggtcttatgaattggcataaaaacaatattatcttttggtacatcataagaatgcaatttattttcgtcattttgtaagcaaaagcctctaaattggattacttcttcagtattaccattccaaagagctgttagtttaaactcatcttttgaagagaaaacaattttttcagaattattaattacatttttagtaagtattttcacatctacaattggttcatgggataatctatttaaaactggtattaaagcaaagctcaataaacttattagaccatgatacattactgttgttctgggagaagaagatttatcagcagttaaaagcaaaaaactaaaaatactggctgctattattatacatgcactcattatattcactaattttgcaggatatctatttataaaaacagctaattttaccctataatctgataaaaagcacatacttaccattaaaacgacaatgataaaaatatatatcatatatccaggcgcctcaatttcagaagttaaaaataaatatacgttaattaaaatagctgtatatacagttgatatagctactataagtccattaactttattttgaaaaaagcttttcattcctgttctccaaaaaaatagccagctcatcagctgactacaaacttactttcccaacttctcccgaatcaacttcttagcctcatccacaataggcgctcttagcagcatcaccataacaccgacaacaccaacaataacttcgagtcccatcattagccaagaatctttcaagtgtgtattcatccaaaaaactggcaaaaacattactacaccagagaccaaatacttccataggctgttaaatagagtcctatagctcaacaaaccacgaaccgcaatcagttgatacaaagtaacactaatttcggacaaaacagttgaccacatggcaccattcaaaccataaaagtgaatcaacgggaaatttaaaattatgtttactacggcacccactgtaacagaaattgtaaattgcttctgatggtgaattggtaataggtactgcacgccaagtgcgttactccaagcaatcatcaaaatcacgatagactcaatcatcattgctggacctactggaccatagccgggaccataatattttggagctaatgttaaggagattgctgccaagccaaacatcattggtacagccatagccgatacaaaatcaaaagacttatacaacatctgatttaccttcttcatgtcaccatgtgataccgcattggctacatgtggcaacatgactgtaccagttgctgtcactaaagccaaaatcaacttcactaagctatcagaatattgatagtaaccagatgctgtttcattaaccatgacgcccaacatcgtacgattcaattgtacataaacttgagtagctatttgcggtatgaaaagctcaaccattggtaaaaagtgaatccaaggatttaaactcctaatcttaaccttaggcaaatctcgataaatatccggccacaaagttaagttacctagtagagttgacaatgccaatactacaatatataaagttacatcatagggtcccttgataaaaacgaagatcgctatcattgatacaatctttaccagtgagttctttaaaaccgttactttaaagttttcaacaccttcataaaaccaagaaatgtcaaaagccacagcaattagattaagcgactgagccaacatataatcaaactgtcgagtataaaaaataaggaagatttcaaaagcaataattgatacaagagtcattattgttttaactatttgaatctcccaaaaagttttggccattttagttcgattatctcgaacataggctatttgccgattcccataataaccaattcccatactagcaaataagataaagtattgaataatggaatttgtaaaagcattagcacctacaccttcaggtcgtaatacacgactgacatatgccgatgtaataagcggaactattattgctaatacttgataacctacattatagagataatttcgaatgaccttcatttaaaacctattcaccaaattcattatttaccgcatcgagtgcagcatcaattacctgatccatattgtaatacttgtattgaccaagacgaccaccaaagattaccttgtcttgtttctttgctaattcagcatatttagcgtacaaactattatttctatcattattcactgggtaatatggctcgtctccacgcttccaatccgctggatattcccgggtaataatcgtcttatctggatcacccttaccgaattcaaaatgcttgtgttcaattatacgagtgtaggggatttcagcttcagtatagttgatcactgcgttgccttgatagttgccaacattcttttcttcagtttcaaaacgaagtgaacgatattcaagttcacctaatttatagtcaaagaacttatcaatcataccggtgtagacaactttatcatagttattaagatactcttctttatcatcaaaaaaatcagtatttaatttaacttcaatatttggatgatcaagcatcttttccaccatttttgtgtaaccaccaataggaataccttggtaatcatcattgaagtaattgttatcgtaaatcaaacgcactggaagacgcttgataataaaagcaggcaattcagtacatggtctgccccactgcttttctgtataacccttgatcaacttttcatagatgtcacgtccaattaaagaaatagcttgttcctcaaggttttgtggttccttgcctgccatttcttgtcgttgttcattgatcttagccatagcttcttgcggagtccctactccccacatctcgctaaaagtattcatattaaatggcagattatacatacgtcctttatagttggcaacaggactattagtataacgattaaattcagcaaattgttgtacataattccaaacttctttgtttgaagtatgaaaaatgtgagcaccatattgatgaacctgaatcccatctacttctttagtataaatattacctgcaatatgatctcttttttcaattactgtaactttgtttccacgttttgctacttcatgagcaaatactgctccaaaaagaccagaaccaattattagataattattttccatcactattcaaaaaatctctttcaataaaatttctaaaatgtccagaccaagctttccaactggtaagactaaaataaacatttctactttcatcagaaagtctttcaaattctttatttctatatgctttttcaatacacttaccaaaatccccctctccgcgacaatggcagtgtatatccatttttatcatttttaaacaaaacattttgacttccgtatggcatccattttggatttacaggagcaatataacctacttttctacttttctatttttttagagtaacatacatttttgcagtaaagttagctgtttttctattcataaagaatttaaaaaacgttttttttatcatgctattttcaaaataagggactgtatttatctctatatcttgtaattcgtaaactgctgacattatattactccaatacttattattaaaaccattaatagacaccctcttatattctgccaatataagtcgtagttgcatataaagtctatacattaaaaaatcgacattattatcgacattattatcgacattattattgttgattatttcaaaagtttttttccacacggttaaataagaaactgtcaaatcttttgtgtaaatagttctttctcgtaaattgattttttaattatttatttaatcaaagtaggattctaaggtgtcctgaacctgaccaaagcctttatgaattcgattgaaataacggtcattgtagctcattgcctggatgccaataaatgcatcaagcgactgttcagttggaaactctgccttaggcttagctttgcgcttgatcacattgttaaatgattcaatcatgttagtcgaataaattgaagctctgatctgcttgggatagttataaaagaccagcagatctggttctatgtctttcaagcttctgataacatggctgtaaaccttgccccatttggtatagaagtcatgcaggacagctgtggcttcttctttgtttgtctgttgatgcacctgtttgaattcgttcatgatcttttcacgatcgtcgacgcgtactttagcgcagatattgcgcatgacatgaaccaaacagcgttgaaaatgagcttttggataagtctgagctaaggctgttttcatgccaacaacaccatcagaaagaaaaagctcaacttgctttaagcctcgggatttcatgttttgaagcatatctgtccagacttcaatgttctcgctaggcgcaatgcagtagtcaatgacctccttgtgcccattaggcttgatgccaatggcaatatagactgcttcacgctcaaatgtttctcggcgcaaaggaaggtatgtcgcatccaaatagacgcagaaaaacttgtcgcttagcttgcgtttgtggtaagcctcaacctttggaatcatctgcttggaaatatttgatacctgagctggactgtaatggctgccatacatcttttcaattagatcggctatttccctggtggtcacgcccttggagtaaagcttgataatcatgctttccaagatatccgagtgctgcttgtagtcaggcagcgtgtgctgatgaaattgaccgttgcgatcccgaggcacttgcacttcaattgggccaaattgcgtatcaactttgcggaaataagcaccatttctagagttgccagtattccagccatttctggcatagggatcatagcccagaaaggcagtcaattcagcttctagcaagttattaacagcctgttgtagttctttgcgcaataaatcatttattttgtctggattgaatagagcttgagcaaaatctttggtaaaatcattcatgaaggagttcttctttctgtatgtgttttttttgttcaaaccaatcatacgagaaaggaactcctttttctaatgtttaaagaaataaatttaaggaatcattcatccttacacaaactattttacagtctcttaaataatcattaattatagactttcttatatcagttgctgtatttcctggtctatcttgtaaataaaaagcgagggctttatcataatatgatactttcttcgctctagacaacgcaaccaaatataacaaaaaatccgtataactcacgtgtttagggaaactaacattttttagcaattgggttttataaagttttgcatgcggtgaaacttgaaaaaaagaaacatactaacctagtgttggatcatgaatcgacggattcacgatctggcactttttattttgtctaaaatagaaagtgaagataaagcaaatcaagtcttcagctttttagacacttgatgtcgtaaaagaaacggactgctttaccacctattcttaagtctcttcgaagtctgtgggcacttagatgccgtgtttagaaaattagaattaataggttgataaagaggtttatcttcacagcggaggttatattatggaatcacaaattattttcggtattgatgttagcagtaaatcttccacagtttgtgtggttaatgaccggatcaaacaaggcgaatcttttagaatctctaatgattcctttggctatcaaaaactttatgagcaactgaaccaatatttgataactcctttagttgttttcgaagctactggtgtttattctctaagcctgcaagctttcttagaggattatcatattaagtatttgaagcttaatccgcttaaagcgaaaaagctaatggacaataatttacgccataataaaactgataaggtagatgcttatcgcctggctttaattcaatttaatgccccgcaaaagctgcgtgatccacagcccagagagtatcatgaacttcagaatgccagtcgctattatgaagaacttactaggagtatagttactactaaaaatcaattgcaccgcaacctccaatccactttcccacaaattgaagaaatactgtctcatccatctggcagaatttattgggcgcttgttagtcttttcccacatgctggatatgttctagaaaagaatgagacacaggtaactcaaatgcttaattctatttctggaataggacaacaaagggcacggtacttaaccacaagattatacgcttttgctagagaagcttatccttatgattccaaagatagtattatcgttagagctattcaaaggaacatttctaatttattttcactccagcaagaacgcgactatgtaattaactacatggaaaagctggctaaagcagtaaacgctcgtgctttatccatctatttgagtatcccaggggttgctagaattacagcagtgagattagtagcagagcttggtgatctaagacggtttagcacttcagctcaaattgatgcgtttgttggcattgatccaggaaggtaccaatctggtgaaaaagacagttctcttggcattaccaagcatggcaatcatattgccagaaaaatactttatcgagttattactcaaatggagacggtaaaggctacgcagccttgccatataactgattattatgacaagaaaaaacgatcttcaaatagacaaggctataagaaaatcgccattgcatcagtccataaactgatacgcacaatgtttgctcttatcaaacatgatcaattatatgattacaacatagccaccgaaaataaaagactttagctgaaatcaaataatcaacttaagtataagcaacctatggaaaaactacaagtattcataggcttatttgtggtactttcgctttttcttaaatttaaactcttatttgctttaaccttattcgcatcattaaaacaagtaaatttattttcttaaatcattgataatacttgactttgggtagaaaaacagctgtatatcctgtgtttctgaatatacttttttaggttcaatactttctaaatatcctggtttcacagaacatttatgagcacttccatcatcagcatacacatcaaatcgatcccctactacaatatcagtgtcattatttttggcaaatgtataaagtacttctaaacaatcttcttccaaccaatcatcaggatcacacaccaaaaagtaatcagaattaatactatttatagctaactctaacgctgaaccatagccaccattttctttatcaattactttaattctattatctttcgcagcacattctttcgcatacttactagaattatctggcgatccatcattaatagccaaaacttcaaaattactgtatgtctgattttctaatgactcaaaacatttttttacgtatttttcaacattatacattggaacaattacggttatgtctgatttcattattttattaccccaaataaattttcttcaacttttcagcagtatttctaatatcgtatccttgtttttttaaaaaatttgtattttctgctcgatcatacttcctggatagtaactttaaactttgcttataccactctttaagcgataaatttaagtcaagaaacatcacgttatcagtaaccttaatatctagaggaacattagtggaagctaataccggaagcccagcatcctgagcctcaatacttgcaattcctagtccttcatattcagaaggaaaaataaataaatccattgcttgtagataatcttcaacattatctacatttcctattaattgaacatatttctctaatcgattttgcttaatactcattcgtattgatttttcctgtggaccagctcctataagtaacagcttagccttagtattatttttaataaaataacttaataattttattaaaaatatttgatttttctcaggtgatagccttccaacatgcccaattagtatttcatgatctgaaatattcaatttgttacgataatgttctctagtcccaatattatatgcagctttttttgttggagcaaccaaaacgtcagcatatttactaaagattggtgcataaatctttttaattacttcatgctttacatttttattttttcctgacatgtgcgaatgcacaataacttttttcacacctgcttttttagcatacaaggtaaataatgcaagtatagatatacttccactatttatatgcacaacatcatattgattatctagcagaatttttttatatgcatttacaacattaaatctattctttccaacattaaaaggtaaattaaaagagtatagcgtagaatttagtgatttaataaagctaatatagtcgggattatcagcataatatggtgttaaaaaatcgaattttagaccttttttgttcatattttcaattgttctaaatacaaaagcctcttgcccgccatacaaaattggctcaccaaacgcctctaaaatctttttcatactatccaactttctacatttttattttatatactctatagacggattaaaacgtaatccctcaattgttcctttaaatatcatctttaaccttttacgtttattatttttagctttgaacaaaacccttatcatgtgatcatttaaacgtaaaaattcatatccatatccttttagcccttcctttctataaaagaaaaaatcattcctatacaaatatctatatctttctattctttctgggacatctgttgcaatgaaactgtcaaatcttttgtgtaaatagatctttctcgtaaattgattttttaattatttatttaatcaaagtaggattctaaggtgtcctgaacctgaccaaagcctttatgaattcgattgaaataacggtcattgtagctcattgcctgaatgccaataaaagcatcaagcgactgttcagttggaaactctgccttaggcttagctttgcgcttgatcacattgttaaatgattcaatcatgttagtcgaataaattgaagctctgatctgcttgggatagttataaaagaccagcagatctggttctatgtctttcaagcttctgataacatggctgtaaaccttgccccatttggtatagaagtcatgcaggacagctgtggcttcttctttgtttgtctgttgatgcacctgtttgaattcgttcatgatcttttcacgatcgtcgacgcgtactttagcgcagatattgcgcatgacatgaaccaaacagcgttgaaaatgagctttaggataagtcctggccaaggctgttttcatgccaacaacaccatcagaaagaaaaagctcaacttgctttaagcctcgggatttcatgttttgaagcatatctgtccagacttcaatgttctcgctaggcgcaatgcagtagtcaatgacctccttgtgcccattaggcttgatgccaatggcaatatagactgcttcacgctcaaatgtttctcggcgcaaaggaaggtatgtcgcatccaaatagacgcagaaaaacttgtcgcttagcttgcgtttgtggtaagcctcaacctttggaatcatctgcttggaaatatttgatacctgagctggactgtaatggctgccatacatcttttcaattagatcggctatttccctggtggtcacgcccttggagtaaagcttgataatcatgctttccaagatatccgagtgctgcttgtagccaggcagcgtgtgctgatgaaattgaccgttgcgatcccggggcacttgcacttcaattgggccaaattgcgtatcaactttgcggaaataagcaccatttctagagttgccagtattccagccatttctggcatagggatcatagcccagaaaggcagtcaattcagcttctaacaagttattaacagcctgttgtagctctttgcgcaataaatcatttattttgtctggattgaatagagcttgagcaaaatctttggtaaaatcattcatgaaggagttcttctttctgtatgtgtttttttgttcaaaccaatcatacgagaaaggaactcctttttctaatgtttaaagaaataaatttaaggaatcattcatccttacacaaactattttacagtctcgttgcaatgtttgcaccaacattagtttttgttttatgtacaacaatactattagttacaacataacattcatattttgaggaaattcgtcttgtatattcccaatcatcagtccaaataaagaattccttaattggtaaccctacttttttgataactgaaactggaacaaataaggaaacaaaagaagctaaagtaacaggtatcaattcagatgaaaaatcagacacattttttgttaatgtccttctctgaatattcatcgtacacaaggtattatcggtccacaaagttttactagacaaaaaaccataatcatgatttagttttatatctgccttaagaaactcattcaaagcatttttagttggtatgcaatcatcatccataatccaaacaaaatcataatccttttgagctaccatctttataccatactgaaatccaccagcaccaccaagatttttccccgtattaacatagtttatactgttatcatcaatatattttgcaatataattaactgtaccatctgtactattattatcaataatatatatatctggctttgcggtttgttccaataagcttttaatacattcttttagtaacttttttctattatatgttactacaatagcggcaacttgctgtttcctcataaactttaattctcctttttattcataaagctaactacagaaataaaacttaataaaaatggtactattagaaatctaaatggatcatacatattttgtgacattatactagttaatgcagtagtgcaagttagtaaaaacaaaaacttattttgaacaaatttgactttttttaagcttacatataatcccattacaaatggcgatataaaaatagcaaaacctattattccatattgaaataacatagataatatacctaaatctgattggtttaccatatgtgtatccaatatattaaaataattcccatcgtttgatataccatatccccaccatacacctctttctatccaaagagtttgatatgtatttaatgtcatcattcttatttgagtactagatccatagtctgcatttgaagttgaaaaagtattaaccaatttatttaagtaatttcctctaaaaataattggactaatggctatagctcctaccacatctagagctttacttttaaaagtatcactaacgataagtatgaataccactaaacttaataaataggctatttgttgtgaacgtgagtcatacacaatatatgcatataaaaagcataatactataactgagatattacgtgttttaattacaacacttttttctttgatgattttgaaaagagccataacccatacgtaattatctaaaaaagtacctggtaatctacttactccatttctcgcccaagcaaatcccattacttcaaaataacctggagctacattcatacgtaatttattgtacaaaaaccacgcgctaaatctaaatattaatatagcaacccccatataatatatattattaataaatttcattcttcgtttagcagtcgctagcacctccgtcatcggaaacgttaacaacatatacgcataatatctattatgaattaaagcatctttaattgtgtacccagataaggaaaaactatttagcctatataactgtagcccaaacataaaaataaaaacgcctatataaatagatacatatctgagactgtaaaatagtttgtgtaaggatgaatgattccttaaatttatttctttaaacattagaaaaaggagttcctttctcgtatgattggtttgaacaaaaaaaacacatacagaaagaagaactccttcatgaatgattttaccaaagattttgctcaagctctattcaatccagacaaaataaatgatttattgcgcaaagaactacaacaggctgttaataacttgctagaagctgaattgactgcctttctgggctatgatccctatgccagaaatggctggaatactggcaactctagaaatggtgcttatttccgcaaagttgatacgcaatttggcccaattgaagtgcaagtgcctcgggatcgcaacggtcaatttcatcagcacacgctgcctggctacaagcagcactcggatatcttggaaagcatgattatcaagctttactccaagggcgtgaccaccagggaaatagccgatctaattgaaaagatgtatggcagccattacagtccagctcaggtatcaaatatttccaagcagatgattccaaaggttgaggcttaccacaaacgcaagctaagcgacaagtttttctgcgtctatttggatgcgacataccttcctttgcgccgagaaacgtttgagcgtgaagcagtctatattgccattggcattaaacctaatggacataaggaagtcattgactactgcattgctcctagtgagaacattgaagtctggacagagatgcttcaaaacatgaagtccagaggcttgaagcaagttgaactctttctttctgatggtgttgttggcatgaaaacagccttggccaggacttatcctaaagctcattttcaacgctgtttggttcatgtcatgcgcaatatctgcgctaaagtacgcgtcgacgatcgtgaaaagatcatgaacgaattcaaacaggtgcatcaacagacaaacaaagaagaagccacagctgtcctgcatgacttctataccaaatggggcaaggtttacagccatgttatcagaagcttgaaagacatagaaccagatctgctggtcttttataactatcccaagcagatcagagcttcaatttattcgactaacatgattgaatcatttaacaatgtgatcaagcgcaaagctaagcctaaggcagagtttccaactgaacagtcgcttgatgcttttattggtattcaggcaatgagctacaatgaccgttatttcaatcgaattcataaaggctttggtcaggttcaggacaccttagaatcctactttgattaaataaataattaaaaaatcaatttacgagaaagaactatttacacaaaagatttgacagtttcacatatcttgaaacttttatttctctatttttttgatttacataaataaaatacagtaaaacagatataacaacacctatactaatacttaaagaatttaagtctttaaaaaagttgataaaacctaaatataaaaaaactataaggtaaattgaatattcatacagttttactgttttccatctcatattttttctcataccaaattaaaaatgtgttttcgtttttatacctatttttcgtttaattaaagaaaagcctttctttaaagtattctttccaccaatttgtccccaaggaacttctacataagtaaatgaattggtaccaagccaaacatccattaacaactcagaaatatatccaaatactctcgcttcttgcacagaatattcagaaatattaatgctattttctagcttacttagaacatcaaacatgaagctacaatatgattcaaatgcattccttttcataataaacatattaaacatatgagccccacgctttttcataactttatcaaaagcaggaagataatttggatatacttcagcaattacctttcttgcttcatccaaaggctctttatgatgtgcatgaatgtaatgtgaataattagtttcaatataataatttctttttttaggtaaaattacatcatatttttgtaaaagctgatttactttctcaatactaattacattatctaaagaatatggtcttttctcaaagagtaatcttctatagtgaactaatccaatagcgtcaacatcttttaaattcttccaagcccaataaacagcagttagttcattgtaattaggatttttagaggatatattttcaccatcatcatcacgctgataggaaatacctggtttataattctttactgcgcctactaatactggtaaatatccttcctttttgggcataggaaactctttatgcgcagcaaccaaaatttctattttcaaagactcttctcctgatcaatacgctccattaggatgaataaccaccccaattgtcttaacaatcaacttcaaatcttcccacaaaccggaatggttgatatacacaatatcaagccaaaccatttcgtcaaagtcagcttcactacggcgtgttacctgccacaagccagtacaacctggcataacgagcaaacgttgcttatcgtagtcagtatactcagctacttcagagggtagagggggccgtggaccgactagtgacatatcgccgatcaagacattccacagttgtggcaattcatcaagactatacttgcgaattgtatgtccgatcttcgtaattcttggatcgtccttgatcttgaacattgcgccgtcaatttcgttctgatcttctagttcatcaagcatttgatcagcgttaacgaccattgaacggaacttccacatcttgaacggcttctcatctttaccgattcgttcttgagaataaaatgcaggaccaccatcttcatgtcttatttttattatcaaaaataaaaataacggagatagtaaaattaacccaagtgcgctagctagtatatcaaatatccccttaatcgtgtgatacactggtcgtccgttaacttttgcaggattaacttgtagtttatcatactcctcttaccctctgtttgatttagtctatttgaatacactctcttattaatcttatcacgtttaacgcaacttagaagcaaacttgcatatttgcaccaagcattaaaataaccagaactttttcttctgcttcaatgggtgccaatccatctgaactgggtcgccattgatgatacttctagcattatcttgccactgctgagctagatcttgactgaattcttgactcatctttttataagcttcactcaattgatactgccgtcttggcaagtcgtgtgcgtcgctagcaaaggtgcatccctgccccgtcgcaatcaacttacgcgacatctcttcgattttcttgccaaagattcctgtataagagctagcagtaatttgcaccaagcagccttgttccagcatcccttgcaaaatttccggttccttcaagatgcgactattgcgctctgggtgtacgataatcggcgtcaccccgcgctgcatgatcttgaagatcgtgtcttgcgcataagttggcacgtcctcacttggaaattccaacagcatataagtaccgtcttcatcgcagaacaggatatcatcgttatcaagcgcatcaattaagtcacccgacaagcgaacttcctgccctgggaaaaccgtcaacggcaccttggcctcatctagcttctgttggtagagatcagtcagccagacgatatcatccttatggttagtgtaacgaccattcagtgtatgcggcgtacaaattgcatgcgttacgccatctttgaccgcagccttggctaacttaattgaagtgtcccaattttttgagccatcatcaatgccaggcaagatgtggcagtgaatatcgactaaaaccattattgatcgtcactcttttttctaccgaacaggccctttttcttctcagcgccatatccataaccatagccatacccgtagccgtaaccatagccaccgttttcagctctaatgtcgttcatgacgtagcctagaatccgagctttggcaaattttaacatttgcactgctctagtaatcccagccttttgcgtaacgccttgacgtactactaagactacgccgtcaaggtgactagccaactcttgcgtatcggatacttcaagaacaggagctaagtcaatgataaccatatcataatgtgacttaaccaattcaatgaaggtttccattctgcgtgaaccaatcaattcagctgggtttggtggaatcggaccagaagtcaagattgacaagttatcaattccactttcttcaaccacatcatttaaattgattgcgtcagcttctgaagtaagaacagttgtcaaaccagtattgttcttaacgttgaacgtactgtgcaaagttggacgacgcaagtcggcatcgattagcaaggtcttgcgacctgcttgtgcataggtgatcgctacgttggccgtaacggttgacttaccttcactgatgttagctgaagtaaaagctaaggtactaatttcttcatcaactgccataaagttgatgttagtccggatagttctgaattgttcagataccgcactacgaggatcagcaactgtgattaatttggcaccatgcttaattgtatcgtcggtaccacgcttttttctaaataatgccatttacttctcctctcctatactcgacggcttctacgcttagggccattagaattcttattcttttttctaatgacaaatgatgatgacacatggaagtgtgaaacttgacctaagtcaactaaacctaagttatcagtcaagaatgcatcatccttaactgtagtgtcggacatttcacgaattaagactactgcgaaacttaaaaccaagccaataacaaagccagccaaggtaaagagtttcacattaggtgatgattgattaccatcagttgctggcgcaacgatcgtaacgttgttaatgttcatgatgttaggaatttgatctctgaatgaacgcgctacagcgttagcttcaacctttgccttttcaggtgtatctgcagtagcagaaattgagaagacctgtgattgttgttgagtattaactgaaacgctcttggctaattcgctagtagaaacgctgtaactcttaccgctacgttcaactacttctggttgagcctttcttactaatactcggcgaccctctgcattagtcttgtacttagcaggtttagcctttttaaccactctaactgggttagctaaacgattagaagcatcttgcaaaataacatgactagttacaatatccttataggtagtaaccatttgcatgttggcttgttgagtattatatgccgcattcgggtcattcttgttagccttttggttaaccaagatctgtgcattagaagtatactttggtgaaataataaaattagcgacgccccagccgactaaagccaaaccaacactccagataatcagtgcccagatgtggcgacggcaaatttgtagcaattgagtaagatcaattgtattttcagtttgcttttgctcttgttccatttaccttttcctttaataacgattaacgattcataatatagctagccttgttagcagctaccttaacatgtggcaattctagcgccgttctgatcttatcagaaactcgttgacgctcttctctacttaccacttcaatttccatagtgccaaacttagggttttgcgtttctttacttacaccctgagcatgatcttgagaaagattgttagtggcttttctataatccatagcaatcttgtacatttgattcatagtcaagtcagtctgcatctcgctagaaatggaattcaagaaacttgaattaagcaaagttgaaggtgaaacagacttcttaagcaaggccataattaccaagcggtcacgctcttgtctaccataatcctgacgagggtcaccatgacgaagttgggcaaatgctaaagcctttttaccattcatgtgataagtctggcctttgacaaagctataacccatattgttgaaagttaatggagaagttacatcaatccccccaacttggtcaattgccttcttcaaaccacccatattgatcatgatgtagccgtcaattggaacactgtaatatttatcaagtgtcttaatagtttcactaactccacccaatgtataagctgagttgatcttggttacaccatattgtgggtaatctgggaagattgcatttgagtcacgtggaattgaaacaatgcttgtactattagtcttagggttgattgacatcatcatgatggtatcagttctacccttccagtgacgacccatggcaccagtatctgtacccaataacaggatattaattggctttttctcattcagtaaattatcaagagtacgtcctttattactcttggtagtcttagcaacgggagtgtacatattctgcgtcgtatcacgcaaatttttgtagatcatcccgcaaacaaaaagaccgactacaatgatcacgccaataataatccaaaaaccgcgccagaacttacggtgacgacggtggtgatgatggcgatgacaatgtatcggtttattacttgattctgcgttattttccattctaatcctcttaatcttataatcgttattattatatactcaagaacccattttgaccacccttaaaaggtttacatgcggcaaatacttaaaaggaggctcgttttattgctgttttgggttgctgaaataatatattttggtagatgtctaacatgtaataaaaaatgcatccctcgaaaaatggaatgcattgctgctagattgagtttaaacggaattatttttcatcttactatcgccttgccttaaattgtactcacactgtaccatatttagtaagacctaaataaccaaaaagtattaagaagtacattaaatagaagttggatagcatgttaagtattgaagaatcaatcaaagaatttgaaacatattttcagggtaaaccaaatgaagttgaagtagtatcacgaactataaaacaaaaaagtagacggccacataaaccgcctactttatcctaattgttatgatgatcacttgagttagttaaatcatcatttttagttagatcatctatatttccaactactccaccaaatagtgtaaacacacctattccaccaaaaatactaccagccaccgaatgcctttgcatcaccaaaaaagcagaaatacaaatacatagaattgttactattgatactactatcagagatgtccatgcgagccaacctcttcttttttgactagcaacttctaatctccgtctatgcctactttcttcaacaccattattaaattatttccttagcagcattcggatacaatttttggtatccctcaagaatatcaggaagcggaattggtccactatgcatctcaagataagccattatttcttttttggtttctttaggcatctcagatttttgaatttgatcaagaatctattcatctagcgaatctttatctgactttttctttatatcattttctagctttttacttggcttttgatctgccataagatattattccctttcttaagtcgtcccctatcctttgccaatcactggcaatagctttttcctcagcattactattactagaatatatcaacttgtttaataatttgacataaggcatagctacatttttcgataattttttaaacactaattgaatatcggtaaacataattctcacctcattcataatctctttctttattaaaagtatacttaaaatttgactcgtggtaaagattattcttctacatgcgatccacttctttccttattataagcatctgtaatacaataaacttaacagcaaataacgaggtgtttttatgattgataatcaacctaaaaagacaaaagcttatatcgcgggcgtaaacttaaacgaccaaaacttcgactactacatgaccgagctggccaacttgactgaagccaacaacatggaagtagttgggcaaagctttcaaaatgcagaatcaattgtcgccggaacttacttcggtgtcggcaaaatcaatgaaattagaactatggctcaaggcttaaaagcaaaagttttagtccttaatgacaaattgactcccgtacaaattcgcaacttagaaaaattaaccaaaatgcgagttattgaccgcacggaattaattctggaaatttttgccagccgcgctcgaactaaacaagctaaattacaagtgcaactggcacgtttacaatatgaattgccgcgtctccatccctccgagaacaacttggaccagcagcgtggtggtggcttcgctaaccgtggtgccggtgaaagtaaactagaattgaaccggcggacaattggcaagcaaatttcggctatcaagaaggaattgaaggctgttgccggccaggaagaaatcaaagcggcacgacgcaaccaaagtcgcatccctaaagtcgctctcgttggctacaccaatgccggtaaatcaaccacaatgaacggactattgcgtgaattttctaaagaaggagccgacaaggaagtcttcgttaaaaacatgctttttgctacgctagatacttccgtgcggcggatcaacttgaaagacaactttagcttcattctgtctgacactgtcggtttcatttctaaactgccccacaacttggttgaatccttcaaggctaccctgcaagaaacgcgtgatgctgatttattaatcaacgttgttgacgcctctgacccgaacatggtccaaatgattcggacaacacagaacgttttggatgaaattggcgttaaggaaattccgatgattaccgcctacaacaaggctgataagactgatcgcaattacccacagatcgaaggcgacgacattctttattccgccatcgatccaaaatcgatcaaactactggccaacttgatcaccaagcgcgtttttgccaactataaaaagtttgacttgatcctgccactaagcgcaggcaaggaactggcttacctgcatgatcgcgcccaagttttacgtgaagactaccaagacgatggcgtccacatcgaagcgaacatcgcgcccgacgaccaaggacgctttcgtcaatatttggcctaactcgattaggaaaaaatatgaaaaaacataatctgctgttcctttttgccctcacatttttgttagttcctactaacacgcctgtaatggctgctaaatatagtgctagtgagtcaaaaaaggtgcgcacttttcaaaaaagctatcatcgtttgagccagaagaattacaatcagactacgctctttaccgtgcagccaaattttggtattcctttttcagcaggagtgcttgaccctgattacatcaaaacttcaatggcttatgtcaattattaccgctcattggttggactgcctgatgacgccaattatgctaatgataacgttaacgcacaacttggtgctgcagcgctagcttcagttaacgcggagcaaaatctgcgagcccatggtttacaaggttacgtcaagcctggctatatcagtgatactgactgggatacagcggaaaatactacattgggcaatatcaatttttcagaatcaactagcggaaccacggctggcgagatcgttaccgatctgatacgtgaagataataatattgcaggtaatggcaacatcggtcaccgcggcatgatcctctcgacgcgagccacccgaatgggaatcggcgcagcttatggcaccgaaaacaacgtcttgtattctgttgaacatggactatttgccgatgatattttgcgccagcctgtaaaaagccgaatcgtttatccagctgccggcgtttttccttacgaattagttggtggtaaaacgccatggtcttactcatcaaccgagcgaatttctggtcagccgaaaatttacatcacggatttgaccaccaagaaaaagcggcaagcgacgcaggtgcgcaacttcggcactgctctttatggtgacggctacacaacgacaatcacttaccgacctggcaaaaccaagttgatcagcacgcacaagtaccgtgtgcaaatcggcaaacattatagctacagtttcaaatttttcaggcaaaatagcacattgaaaaataaacagattgtaaagcatcgaaaatgaaatacgttgatatgcaaaacggctcaagcagttgtacatcctgcttgagccgttttagatagtaacaaatattgtagtctgttcaacaatcttcatgtaaaataatactcaggtctattgcagcggttagctaccgctaagacttagtaattttagcatggctacacacccctcaagattttttaagttacggaggtggaagcatgcataattgggtagactggagaagtaggcttacaaatgattgcttgggctattgcgtatgcgataacaaaaaaagctaatcacaaggattagccgaaacaacagtcatcttaagttacgattggagttagcgaccgacactcgctagctccttttcttttattattttaatatgatttagaatttattgcaatgtttagaagtgcttattctacgccaatgacgtaacgcatgatgaatcaatagcttgttgtaccaagcataattgtgcttcatataattataggcggtggcaaagttatccaattgtcccgccgcgataaattgattgcgtgtccaatgccaatcctgagtaggataatacaaaattttcactcggattacccttcctactgtaataattgcccgatcatgatgataacgcgtgcgagcaacattgaggtagctaccaattaaagtattgcgccagtatcgattatgcagataatttttctcccaaagtaaggccttgcgcaataccttagaaatgcagtaccattcgcgtttgccgttaggcaattcaaccaaacaccaaagatattggtgtctcttcgccattcaatccaccccttctaattaatatcggctttaattataccgctactagctattcagttagaaaatcaataatgtcagaaaatattaggtcatgatgtcaaatctattcaactgacatcatttgtcctaagaacgcatttaccgcttgcttaatatactcgctgcaaaggtgagtatactgcgttgaatttctggacatggctctgcttaaacggtcttgatgggtgtcattttaatccttctttaatttttactataattttctccacactgaaaactatggcaaaaaaagtagaatttttcagtctagggaaaacttttatcaatacaaaaaagcaagcgcattaatcgcctgcctaaaagtattccaaattacttctctatagtactctcttagcaattgatggtgtaaagtaactcgataccgtttgcaaaatagtaccttgctctggtgttgctgcatttacatattgattgtttcctacataaattgcaacgtggtatggagctgtcgttgaaccccagaagactaagtcacctggctgcaagttgttcaatgaaacagtttgaccaaccttaacttgatcataagttgttcttggtaagttcacgccagccgctttttggtaaacatattgtactaagccagaacagtcaaatgaatccggaccttctgcaccccagacatagttcttacctatctgttgtttagctagcgcaacaattgaagcggccttactagtagcttgcgttgaagaagtttggttagtattttggctagtcttcttgattgccgtattaacaatttgcttagccttcttcaccttagctatcttttcagccttcttctgagtagccgttttagtagctactgccgctgtcttcttattaacagtagtctttgtctgcttagcttccgttttcttaacagttggtgcttgcgatacttctgctttttctccagcagtaacatctacggtataacgcgcttcaatccattcacgcgttccaaccttgtaccacaagttgcccttcttatcgagtgcagtctcagctacattccagaccgtgccgtccttagcacggtagcccatgaattgaccattctcatagttggtccaaatattcaggctcttacctggtaaatagctaatcttaacttgcttaatcgcagtaaaattagctgcacgaacagttttcattgatgtgattgcggaaacacccgtaacggtcagggctgcagccgctcccactttaaaaaaattatgtttcataattgaatccccttggtagcgaaacaggtgaaaacttttcacctaaaattacccactcttactatgtaacgccttcattattgcatgtcctacctcaagaagcaaattagaacattacaatattacaaaaaagacggatcactggaatccgtcttcattacttactatcttaatttaaaacacgcttagcaacacttgggtagaagtatgaactcaaagtttgcttgattacgccttgacctggtgtagcagcgtggatgtattggttgttaccaacatagatacctacgtgatatggagcacttgcactaccccagaaaagcaaatcacccggttgaagattatccatagaaacggttgatccttgcttaacttgatcataagtagttctacccaacttcacgccagcagcgttagagtaaacatattgtaccaaacctgaacagtcaaaaccgttagttcctgtaccaccccaaacataggacttgcctaattgtgctgaagccaaagtaataactgctgaagcatcaccagttgcttgaactgacttcttagcctttttagctttcttaactgcttgagccttatctgaactagcatcaacagtatattgagctaaaatccattggttatcaccaatttggtaccatgtacggcccttcttatcagtcttggtgtcaaaaacattccaagtagtaccatgttgagcacgttgaccagtaaagtggccaccattgtagttgtcccatatgttaattccataacctgcaatgtagttaatctttactttggtagtagcagcttgaacagtagcattagttgaatctggcttgatgacatttactgcagctacaccggtcagagttaatgcagcagctgcggtaacttttacgaaattgctcttaatattcatcaaattctcctgtatgttttcactatatctataagcattcttagaatttattacttaagctggtaacgaaaatattaattcatcgaaaaatctttaaatttctttaatgtatttaacaaaatctataataatgccccaatgttacagtagtgttacaaaagtaatactgatttaataaatattacgtttccgtcaaaaagaaaaatagctagggagatttccctaactatcttaactagatatcttatttttaggaagactaacgcaattagtcgattacacgcttagctgatgatgggtaaaatgaagctaaggtttgttgcttaacattttgaccaggagctggagcgtgaacaaacttaccgttacctacgtagatacctacatggtagttaccccagaataataagtcacccttcttaagcttcttagttgaaactgaaatggtcttaccaagagtaatttgaccgtaagtagttcttggcaaaattttgttaattgcattcttgtaaacgtagctagttaaacctgagcagtcaaaaccgctaggacctgcagcaccgtaaatgtaaggcttgccgatttgcttcttaacaagcttaacaaccgcattacgctccttagtagtagctgattccttcttaactgaacttgaatcaggattggtagtttcaagatctgaaattgagttgttagtattgatagtagtgcttgaaacatcatcagcgtgaacagctggaacattgatcattgaaataccggcaaagaatactgataaagctgcggtgtattttactaaagtacgtctaaaattcaaaattaattgtctcctctaaaaattactaaatttgtttttgatttcttaaatcagttgacggtttatataataccgactgaatgttacacgaatgtttcaaaagagctaccatcgcgttaagaaacatgttaaaaaaacagattttatgtaaaaaaaggagaagcaaaatgctagcgaagctttgctacaagggcatcgagcgcgtttttagtttctgttaaattgtcgttaactaagatatgagcgtattgcttcaaatcttcaggtaaagcatttaattcactgccgctaagtctttctttaatcttggatggatcatcgccccgctttaaaaggcgctgttttaactcttctttagtagaagttgtaacataaagaaaataagccttgtcacctagctgtttaatgtaggaataaatgcccttgatatcgacaattaatgaaaccagatcactttttttccaggccagattcaaagcttctcgacttgagccatattgataagagccgtacttaatatgctcaaaaaagtgcagctgggcaaaagtttcatcggtttcaaaatgataagaaacattctgctcctcgcctgatcgcatcggccgcgtggtatgcgttaatacgcgtggaataccatatttttcagttaaatattctgaaacagtcgtcttgccagcaccactaggtcctgcaataagaattatttttttcaaaacctgattctccccacttgaaaatgttgcttttttataatagcattcttgtgttataaaagactaagactttttctcggaaggaagatacacataatgaaaaaagcagacgtaaaagttggtgcaatcgttggtgccaagtcagaagaagaacttaagaagccattccaaggcaaagttgaaaagatctacgaaaattccgcattgcttgcaattacttcatacgatcccgttgacaccactgctatcagcgacttgaacaataagatcgtagttaacttcaagaatttaaagactgctcgcgctgccaagaacagcaagactgcttcaactaatgaagttaagattgaaaaaattgccaagaagaacgacgataaaaaagaagcagacaagaagtaaaatttgacaaaaatagcccgcgcaatgtttacgcgagctatttttttgcctaaaattaggacatcgatacgagaggaaatattttatgaaagaaaaaacgcgaactgttttattttggtttattttaatccagccctttttagacctttattggttctacaacggtaaattagcggaagttttaccatttactctacctacgattatccgaattttagctgtttttgtgattttctgtatgtttttcagtcaaaagcaaaattggcaaaaattagggcaagacaagtggttaattctatatttagccctactaattttgtattcgattattcacttaatccacgtcaaaaactttaacagcattaatcctaatgactacaattattcaaccgtaagcgaaattttttatctcattagaatgcttttacctctgatggtgatcttttttacaaaagaattgaatttcagtcaggagcaattcagacacgttatcgaaggcatcagcggacttttttcatttacaattgtcattaccaatctttttgtcatttcgcttagaagctacgagacaggcccgattagcgctaatatttttgaatggtttgttaaccccaatatcggttactcccatatggcctccaaaggcttcttcaattttgccaacatggtatcagccgtactctttatgctggtgcctctgatgctttacttcatgttcagtcgttttaactggaaaatcgtcactttgaacgtagttcaagctttagcgatgatcgagttaggaaccaaagtggccctcatcggtttaatcggtggcgtgattatcagtattttgctgtatgttttccacttatttattgttaaggatgttaacaaaaacggcaaagccattatcgtggcgcttttaatcgaagcgggcacctttgccatcatcccctttggtccagcaatccagcgctataattatgaaaaatatttggctcagcaatccgatgattctttgacacaggccaagcgagaattaaatgctggcttaaaaaaatatcctcaaggtaaacagcgcaaggaatttttaacgaatttcatcggcaatcattatcaagattacgccttaaataagaagtttgtttttaaaagctacccttataaatacgatcctgaattttggctcaaaatcatgaacgagccaggcaccgctagaatgcaaaatcgacatgtagaaaaagcgatgcttgatcaagttgtgaagactaacaataatcgactcgacaagttcctgggcatttcttacacacgagaaaccaacattttcaaccttgaacgtgatttcactagtcaaatttattcacttggttggatcggcatgctgttgttcattgggccttatgtcattatcctgctctacgctttaattaagtggctaatgaacaaagaaaagcggacttatttgatcagctcaatgttgctttcaatcgcctttatgattttcgcagcattctcgtcaggtaacgtaatggacttcttaacagctagcttcatcctggctttcgttgaaggcagcttgttagctagcgtaaccagaaaagaaaattaaacataaaaaaagttaggtagttgcttgcctaactttttcttagtttttaaacattatttttcttgcttaataaagcttgaatctggcacccgaattaagtagtaccgagttgctaaatgacctgcatgcatcccgattccattttgccaattccgcttgtacttagccgtataaattgccacgtaagcacgttgatactttttatccattttagccaattccttttttacataaggaatcttctccgcattcacgtcaagcgcagtgttaccataagcaatcgaagcatagtcactaccaatcgtgaccttgctgccatcgcgataaaaagtataagtttgtgagccatatctcttcttagcagaattaatcgttacatagcttgaatttcccgcacctgtacgcattatcagtggctcatacttcacgcttgaagtaatgcggtttgcatcttccaggtctggattgtccataaaagtctgattaaacatccaacctgcagctaataaaagtactacaatttccacaatattaagagccatattcggccaactaaagcgtttatgctgtttgataatcatcttaatccgtctttgacggatgttctggacgatgaaaactaaataaagaatgatggcaacccaaatcaggatcccaatgatattccagctgaacatatctcgccctgctatataaaacatagaaacatgcagaagttttcatatttctacatgtcagaaagaaatatattttcctttctttgtcttatttactgctgtcttcatcagtattccgatattccatctggggagtaatcgcattgactaactcttgcagcttaagggcttagccagcccattgtttttattttgttaacgctagtaaatttaatactgcattgtcatcacgatcattgctatagccacattcataacaaatgtattcattatgcttggtgccatgttttttattgccctgcagagtaattttgtctgcaccagttttgacatagccacaattggcacatctttgtgttgatggatatgttttatcagctagaattaattctttgccataccattcacacttgtaagtcaagacttgtctaaacttgccaaatagtgacctttgcatgcctttggaggctacatgggtcatcatcatttgtttgacattcaagtcttcaatgacgatttggtcataattgtttacatgctcagtggtaaatttttgcaaaagatcattctgaatattggctgctttgcgataatcacgctgaagcttggttctcacttgcaggtaattattgctttggcttgccgatttaccgttaactcttctctttttagacaatactctttgataatgcttgattcgcttgtacagtttctgtagttttgctggcaaaacattaatcttgccttcagtgtagttgaaatgcccaacgttgacatcgatggcggtctttttgccagttttagcctttagtccagcctcttcttcataggaaagggcagcgtaataatgtcctctttctctaaagatgctggcaattttaacctcttccatctttaatgcctcgtatgctggaatatcaaaccaagatttaatccctctaggcttatctaatctaagcttgccattaattatcttggcgcgatcagttttaaagccttgacgtggagctttcttagatttgaaatgcggcttgccccaatcaggctgggtcttgtcaaagaagttcttccaagcattagccagatccttgactgctaattgcagacagcgagcagacaaagcaaattgccaatcagccttgttattgactaattcatcccacactcgatgctcattaggactaggattattatccttgtctaaagtccaagcttcatacatgtcttgccaggttgctaaagctagattccagcagtatctgcgatagttacaaagacgttcaagttctctttgcattatcttatttggccttaattcgactacctgagttttgatcatttgtttcacctccaatgcaaacataagtttagcaaaggatgtaacaaaaacaagcgaacaaaatattaaatttttagcagcagttaatttgcttctatgttttgcctttctgaacaaattacctgtatctttttctatattgccattaaattctatatttcagctaaccatttaatcctcctttttttcaattatatggtaaaaaaagcaaaatttgaataggataataattgaatacttagttaaatagtgagaagatcttactagtacattagatttattagggaacattatggtagcaatagctttttattcaattactgggcaaacggaacgttttattaagaaaactcaactttcggcccatcaaatcgacgatgccaaccctaagtatgatatgggaaaatcttatatcttaatcgtaccctcatatcaggacttcatgatggattcagtcgttgattttttaacgtataaagataacaaaaaaaatattatagggattatcggttgtggcaaccgaaactttaacgacctctttgctcaaactgccaaaaagatcacggcaacattgaaagtgcctattttgtatcttttggaatttagtggtactaaccaagatgtcaaaaatgtacgaaaaatcgtacacgatctttctgctggtgagagtactaagcaagtccaaaagcctaaggaattacgtgggaatatcagctttttgagtgattttagagattaaatatgactgaaaaatattacaaagcaattaactggaatgacatggaggaccgggttgacaaatctgcttggtcccgcctgaatgatattatctgggaaccccgtaatgttccagttagagaagataaaaaagaatttttacaattagacaagccggtgcaagatgccttgcttcacgcattcggagcactatctttttcatctggactccaaatgaaaaatgggctagagcaaattaaggtagatgccatcacaccagaggaagcagctgtgctgaatgccttgcaatatttggaatctattgccaataaaggctacagctacgttatcaacgagttgacggactcaaatatagcaaaagacgttattaactgggctgatgacaatccttacctgcaaaagaagattcggattttgaataaaatctaccaaggcggggatgcactacaaaagaaggtagctaacgttatcctagagacagctctctatcattctgccttctacgctccgctttatttattcggacaaggcaaaatggtacgaacagctgaaattgttaagttagctttacgtggcacttcatttagtgggatttatcctggttacaagttccgcttaggctaccaaaaattaggtaaaactgagcaagcagagctaaaagaatggatcgataacttgtacgatgtgctaattgataatgagaagaagcacattgagttaatgtacaagggcactgactggatcgatgatgttacgcactatctctactacagtgtcaacaaggcctacctcaacctaggtttttcagccaagtatcctgacacttctgattcaatcaaccctattattgaaaaaggggtcatcaagaatgcagtgcttgaagacttcttcttctacactaacgatcactcgctgactaagtttaaagaaattaaataattacaaaagtgtctgggaaaaaactaagtctcagatcatgaaaaaagaacgttgaatttttgtttcaacgctctttttgtatacttttagctccagccttgatattattaaatcatcacaaaataaaaaaggtggaaactaacatgtacaagaattatatcacaggtcaaactgctttaacacttaatctagattttgccattccggccaatcatttggctaatgtcatcagctggtttgtagattcaattccagaagatgttttagtaggcaagactgctaaaacgggccgcccagcctatcatccagccatgatgctcaaaatactgctttttgcttactccagaagagttttttctggcagaaagattgagttgatgctggaagaaaatctgccaatgatgatcttggctgaccagcaaaagatttcatatcatactatcaataattttagatcaagcagccatgccaatgaactgattaaaaagagctttatctacttcactaacctgttagaagatgaaggcttaatcaatgaaggtgctgcttttatcgatggtactaagattgaagctgatgctaaccgctatacatttgtctggcgcaaagcggttgaaaagtatcatgaaaagctgaaaggccaggcagttgaactttatgatgaattgattactaaagaagtagtcaaagaaatggaaaaagaaaaagttcaaactagtcaggggctaaaggaattagctcaagaaactgaagcagaaattaacaagctgactaaagagattgagcaggaaaacaaagccattcctggcggttcacctcgaaaagccaagcgacgtggactaaaaaagattctgcaccggctaagaaaagattatgtgccaagaatgcaaaaatatgaagaagccgaagagatctttgccggacgcaacagttattccaaaacagatcatgacgccacctttatgcatatgaaggaagaccacatgaaaaatggtcaattaaagcctggctacaatattcaagcagtcacgaccgatcaatatgtagttgattatgccatctttcctaatccgacagatttcaaaactttggagccggttttggatcaaatgaccgtgttggacaagtttgacaaaatcgtcgccgatgctggctatggcagtgaatacaattattcgatgctggaggaaaaatatccagacaagaagtactttattccctacactatgtatgaaaaagaacagaccagaaagtataagaatgatccaactaagctaatcaactggtactacaatgaaaaagatgattattacattgatcatcatggcgtcagattcaatttcaaatattacagccagcgtaaggatcgttctactggtcaggtccgtgattttaaggtttatgaggcagacgagttccagctaacgccagaattggaacaattggctaaaacagctagcggccgccagcgccaagttcgctataatcctaactggcaatatttaaaagaaaaagcaaaagaagttctccaaagcgaagaaggcagacacatctatggcatgagaaaatatgatgtagagccagttttcggacatttgaagaacgtatttggcatgcgcagaacgcacctgcgaggtaaagagaaggtcgaaaccgatatcggaattgcctttatgatgatgaatttgaacaaatattgtcaaagaaggtggctgaagggccgatttttattgttaaaaattttaaagagaacaaaaaaacgatcaagattcttaaaaaaggaaatcttgatcgtttttattcatctggaagctagttttttcccagacactttttttacttcttagtagttttcttggttgcctttttagtagcggttttcttttctgcttcctttttttcaggcttcttatattcacgtattgtggttagcttttcaataattgcctccaccagttgatcaacaatcttcgctggatcttgttcgatctctacttcactggctaattgatcaattctaaagcctgaaacattaacgtattcagagcgcgtttcaaagtaaacatttaaaggatattccttaccctcttcaaagaagttagcaactcgtttgtaattgctataaggcaaattgataatatttgtctccaaggcaaaagtagccggccgctgacccgtcactgctagttgcgtttggatcaatgaattatgcttaaaagcagcgataacttccttgaccatcttttcagcatacggcttgattttgctcttcgacttgctaatgtcggcatatttaactgtttcaagatcttgaatataatcttgattttcaattttttcgttgagatcttttaaattaatttccaaaataaactttcctttttcattggttataattacaaaatactacaaaaaaattttttgtcatcctttttaaggattcaattcagtatttttagctttttatttgttaaaatgacactatgaaaaagcaaaaatttgatcttaagtatttatttttactcattcccattacgttaattctcattataggattgatttacctttttaacaaaaataaaatcgataatgaaattaattggatgacaatgaaggaagaacagcggctcaatgtcccgctagaaaatcaactgcccgatctacccaacggctgcgaggttactagcctatcaatgttactgaattactatgacattaaggttaacaaatatgatctcgccgataatattgctcatgttgattctttcaccgacaacggtaaatatcgcggcaaccccaatcaaggctttgtcggccatatgtctgtcgctaatgctggctggtgcgtttatcatgggcctttatttgacgttgcacgtaaatataccagccacatagaagatgcctctggcagcaattttttagcgattctcaagttaatctccgatgggcatcccgtgctgatcattaccacaaccacttttaatcatgttaacaatatgcaaacatgggaaaccaatactggtaaagtcaacgttacaccgtcatcacatgcctgcgtgatcacgggatacaacaagcaaaagaagcttgtctatgttaataatccttacggtattaaaaaccaaccggttaattggcataacttagaattgagttatgaccaacaaggacgccaggcactttacatcaaataacaaaaaagggcaagccacgaaggcttgtccttttaactcaaggcacatgctcaaagcatatgtggacgtttaaactgttcacatcagtgcgtccaacatcagcacttcccgtgcttgccacttaaggcggatgtcctctatctcataaatatacgcatctcgcgttcattaatcgactcgtcagtcagtaattgtactattttttatgtttgatgtacagtctagcacttttaaaatgacgatatttaaatttataaaaaacttcagtacacatagtcgataacatgaaacctaaagcaatagcaccagtaacaattgctactcgtagaagcaaattctctccttgactataatcccccacaactaaagcacgtactgcttgataagcaggcacgcccgggactaacggtactaaggcaggaatattaaagaccgtcactggactttttttaatgcgtgcaaaacacaagcccaaaatacctatcaaaaaggcgccaattaaatttgaaatcattcgcccaaatcccaaattaaagcaagtccaatatgccatccagcccactgtgccactgactcctgacaggtgaagatcgcgatgcggtacattaatagttaatgcaaaacccaccgaagctacataagaaaaaatgacattaataataatttctaaccaaagtggcatttttatactcctatgaatttaagtacaagtgcaactccaccgcctaaagctaaagcggttaacacagcctcgcacattcgcataatccctgataataaatctcccatgaatagatctcgcaaagcattagtaattgccaagcctgggactaaagtcatcagagcgccgatcaaaatattatcagtaatcatttgtggattaaaatgattgaataatactgccaagatccccatgaccattgctgcaattagctctgataaaaaacgaatcttagtatattttttaaactcataatacgaccaaaaaccaacagcccctactaaggcagcacctgggaaatcaacccagtcgtaattatccataaacaaaaccatcaaggtagcagacaatacagcagctcccaatacctggagccacattgggaaagtaggtgcttgtgatactaaagcaatcttttcttttaattcagaaagagtgatttttttaactgcaaattggcgcgacaagtcattaacccggtctactaattccaaattgatgttgcgatcacgaatttgtttcatctgacttagcttgccaccatctaagctcatgaaaacacaggttggcgtcgcaaaaacacgcggatcatcaattccggcattgcgagcaattctgagcattgtatcttctacccgatacatttcgctcccgccttcgatcattagtcggcccgcagttaaacaaatatccattacttcttgataaaattggacatcccgcttctcagacatagttttagcctcagttcatagtttcaatatcgatggtcttgtcgacccaatcaccgcggaaaaagtcacgttcgtgactaacaataatgactccgcctgggaagttaacaatcgcttttctcaaagcatccttggtatcgttatccaagtgattagtaggttcatcaaggaaaagcaaattagctggttcaaactgcatcttagctaattttactttttcctgttccccaccagaaagttcctttagtggactcattgcttgttgtgcagttaagcccatgcgtgccagcgcttgtcgcaattcctttggctttttgcgttcaaattcttcttgtaaatattggagtggagtcatgttgctattaggccaggttagatcttgcttgaagtaagccaactttgcagtaacagataactcatatgaaccataaattggctttaattgccctaacaatgtcttaagcaaggtagtcttaccaattccgttaaaaccagtaatcgccactttttcatccccaccaacagagaaattgaaggctgacttgaccaaagcatggtcgtaaccgatgaccaaatcttgcgtctgtagcaacaaattagaagcagtcgcaacatatggaaattcaaagcgtgccttgcggttgttttttggcggtgtcaaaacatccatccgcgccagctgcttttcccgtgacttagcactcttagcacgtgtacccgccttgttcttgcgaatataggcctcagtcttagcaatcttgcgttgctggttagcataagccttcaagtaggtctcacggttggctgctttttgccgcaaggcttgcttcaacgttcctgtataacgagtaattgtgccaaaatcgatatcgataatgcagttagtgattcggcccaaaaagtcataatcatgactaacgacaataaaggctccagcaaaattgttcaaatagtcaaccagccaatcaatatgtgaaacatcaagatagttagtcggttcgtctaaaaccagaacatctgggctttgcaacaacaactttgctaaaattattttagagcgctgaccaccagataacttagaaacatcgtgatcatagcctaaatcagctagtcctagtcctgaggcgacttgttcaatttcagtatcaatatcataaaaattattttcttctaaataagtctgtaccttgccggctttttctaacagggcttcgtccccgttttcggcatatttggcatacagatcattcaactctttttctttttgaaataattgatcaaaagccgtccgcaaaaagccacggatagtcacaccaggtgccaatttagcatactggtccaaataaccaacatcaattttattttgccaagttacttgaccatcatcgggcaaaatttcacccgttaaaatcttgattaacgttgacttgccaacaccattttgaccagtaacccccatatggtcttctttgttaagcacaaaattggcatcttcatataaagttttatcaataaaactctgacttaaatctttaacagttaataaactcatttttcatcccctattatttagctgattcatgttctttttcataattttggagtgcatcaagaacacgaggccaatagcgcttaggtaagatcagttgcaaacgatcatgataaataggaaaatcacttgcttttagccccgtaatcttagctagctcctgatctgtcagcttatatttataaacaatacgcttaatttcgactgatgcatgtcctctaaaataggataggccgaagaaaaagatagcaaaaacacttgctgtgatgattgctaattgcaaattcatcctgaagctgtgtagacaaataaaaatcacggcaataaaagaaatcacagctgagagtacaccgtaaataactggaaatattgattctttttcttccttttgcataatcttttcctccctaattgagacttagtaactttacgaacttagcagaaatcagccaaatttgcaagattctacgttttcactgatttttttacataagttaagtatacttagcataattaaaattgcacggagaaaaaaggaaaatgaaacaagaaaaacattattatttcacaccaattcatttgcaaattaatgacttagacgtgcaactagttttgccacaagtcgagcaagcagcagaattatatcaagctgttgcctgtgaccgtgaaaatttaggtaagtggctgccgtgggcctacaaaatgaaaagtgcacacgatgaagctaattttattaaacaaattcaagccaaaatgaaacggcagtcaatactcgttttaacaattttagtcaataagcagccaagtggcatgatcgacctgcataatttgattccaaataaaaaagccgagatcggctattggctgtcgagtaaatatcaagggcatggtattgtcacgaagagcgtaacggcgttatgccagcatgcttttagtgagtttaacctacactatattgatctgctagttgctgtcggcaatgacaaaagtgcaaatgtggctaagcgttgtggttttaaattgatgggaattgaaccacagctaattaatgggcctgacggacaaatttttcgtttgattcgagggtaaatatattgtgttcgcttgttatcaaagctaatattagataaaatatttaaacaagtgtttgagcataacactttactataaaaatgaactcaaatataataaaagtgtaaggtgatatgcatcaatgagtagtcggctcatggtcaatctgattctaatgcaggacataagggcctgacgggtagcagggaccaaaattaaacctgatattacatatctaagacgcaatggcttagttggtggcagacaccaaaattaaaccgactttaggagttcacaatttgtggactccttttttacttggaggaaaagagatgaactataaattatttaaatcagttaatttaaaagaattggggcaattacgtcggtacatatccattatttataatagtgctgatttttatgataaacattttgtaaataaaaccatcatttacactactaaaaataataaaattgaactcactgcaagaagagataactttatgcatttatgtggaatttcatatatcgaagggccaagaaaattttttaatgatgctctagatcgaaaagtacagctaaaaaagttcttattaaaaaagatggctctacttttcagaaattacaagttttaaatcaacttaaagaaatgttaggtccacacttaagattaacaggacgtggagcctttacatacctaaaattcgatcattctttacgtacaaataaaacgatcttggctcttacattattaaataatcaaaattatatggttccaatctctttgctaaatttgaaattcatccatccatttcctaaaggagataagattattaaaatagaatctaaagatctaaatactggtaagattattactcttagatgattcgcagctaaaaccacccagtcaaatctttaataatgaaaaagataaccggcaccaataatgatggcaagaaattcagagtcttaacatcacgaatttttaataaagacaaaccggagcaagcaatcaaaaagccaccaacaatagacaattcagtaactaatggacctgtaaaaaaatcagccgacaaaaattttgctaccaagtaaatgctaccttgccagcaaaataaaaccggaacgaccgctagcatcccccaaccaaagctagcgccaaagaccatcgaagttactaaatccagcatggcattggtaaatagcatagtattgtttcccttaactgccgccatcacgggacccacgattgacaaagcaccaatacagcaaagcaaaatctcagtagctagacctttagctaaattagatttgcctgctttatcaactaagtgattaaaacgaccagcgatattgagcgcggtaccgactactccacctaaagccaagctaacaatgaacaaaactggatagtgacttttaggcatgctgttagtcacattctcccaaccgatgcctaacgctgccagtcccattgcgatgaacaaaacgtcttcataacgcttattcaatcctttctttaccaagcagccaactgtagtaccaaccagcaaagcgcaagtatttacaattgttccgatcatttttctcacctcttagttttattttaccgcagaaaaaaagtatccatctcggatactttttcatatttaccatttaaaatgccaactactactcgatgacgctgaagaactagatgaagatgtgctttcacccgtacctgaaccataaccagaattcgaaccacctgccggcttatcttgattttgatcataaatccgataattggtgaaagcattgggatcatcccacttgatgtgattgttctgatcattcaattcattttgccgcgtttcttcattgttcaaagtttgtgtttgcaaattcaggttcttacgaattttatctgacgtcttttgtagttccttagtagacgccacctgaattgaagaaccatcaatccaagcatcatgcccttgaatgtagccactctttaagctattcatgcagccacgataattgagcgccaaactaagcatatcattgaatgtcagattagttttcacatatttattgaaaatatctaccagcttgcggtaattgccaagcgtattaaccgacattgccttatgtgcaattgcctcaatcacctgacgttgccgcatctgacgaccatagtcaccacgtgggtcttcttttctcattcgaacataagccaccgcgtgccgtccatttaaatgctgcttgcctttgtggaaatcacaccagtcatacgagaagtcaaatggaacttggacatcgacaccaccaactgcgttaaccaggctttttagcgccttcatattaacttctagataataatcaattggcacatttaacattgatgacacagtcttcatacttgattcatgtccaccgatttcataagcagaatttacccgaaacatgaagtatttattttctggatcgcccttaatatctgccaaagtatcacgtggaattgaagtcattgtcgcagaattcttttgtggattagctgttgctaaaatcatagtatcggaattaccacgatcatggcgaccttcaatcccctggtcaacccctagaactaggatagaaattggctgtttattggcaattttagctgaagtagcagtgttgccgccgtttttaccatcaatcacactatggacggtaaaatacatgtgagcagcccatgccatgccaaaacaagcagttaataatactgccacaccaatcaagcgggcaaaaaagttacctgatttgagcgctgatgcatctgcggctaaagcacgattccgatgaagattaagcgatgaacgatgagcgcgataaccttctcttcgttttggattttggtccattcttttgatcgtttcccttcgaatttaatacaagttagtttatttgtatcacttttaatctctcgataaaataaaaatgctaataattaataataacttatttttttgcgaaatataacgcaacaagctaagatgtatagaaaatgaaatattatggaggtaaaaatggcaattccaactagaaacgaagtccctgaagagcttaaatgggacttaacccgtatttttaaaaatgacgatgaatgggagcaagcttatgcagctgcacaagaaaaagtggctaaacttgctgaattaaaaggtacactagctaaatcaggcaagaacctgtacgagagcttaaccaaaatcttagctgttaaacgtgatgtggaaaatatctacgtttacgctaccatgtccagcgatgttgatacttctaattcgcactatctcggctacgtcagccgggtacaaagtttggctaaccagtttgaggctgcaacaagttttattaatcctgaaatcttgagtatccctagtgataagcttgagcaatttaagcaagctgaacctagattaaaggattacgcacactatcttgaaacaattactaacaagcgtcctcatacattacctgctgagcaagaaaaattgatcgccgatgctggggatgctttaagtgtttctgaaaatacctttaacgttttgaccaactccgacatggaatacggttacgttcaagacgatgacggcaatatggaacaattatcagatggcctttattctttgctgatccaatcccaaaatcgtgatgtcagaaaaggtgcttttgatacactttatgccacttatggacagttccaaaattccttggcttcaactttgtctggcgttgtaaaaaagcacaactataacgcacgtgtgcacaagtataattcagctcgtgaagctgctttagccgataatggcgtacccgtagcagtttatgacactttaatccaggaagttgattcacacctagacttacttcaccgttatgttgcgctacgtaaaaagatcttaggcctgaaggatctgcaaatgtgggacatgtatgtgccactaaccggaagaccttctctttcatacaatttcgaagaagcaaaagagacagcaaaaaaggctttggctccacttggtgaagactacttgaagcatgttgactatatttttaataatcgtgtcatcgacccaatagaatctaaaaacaaggtaactggtgcctactccggtggtgcttatgataccgatccttatgagttgctcaactgggaagataacatcgattcactttatactttagtccacgaaactggtcactccgttcactcctggtacactcgcaatactcaaccttacgtttacggcgactatccaatctttgtggctgaaattgcttcaactactaatgaaaatattttgaccgaatatttcttagaccacattaccgatcctaagacgcgggcctttatcttaaattactaccttgattcatttaaaggcactttattccgtcaaactcaatttgccgtgtttgaacaattcttgcacgaagccgatgctaagggagaaccactgaccgctgacactttagacgacgtttacggtcaaattaatcagcattattacggcgatagcgttgaaccaggcggcgatattgcccttgaatggtcacgaattccacacttctactacaatttctatgtgtaccaatatgcgactggctttgcggctgcaacggcattagcaaacaaggtggttcatggaacgcctgctgagagggatgcctaccttggtttccttaaagctggttcaagtgattacccaactgagatcatgaagcgtgctggcgtagacatgactaagcctgactacttagaagatgccttcaagacttttgaaaaacggttgaacgaatttgaaagcttgattgagaaataaataatcgcgctcatataaaaataatcgatatcatttcgtgagatttgatatcgattttttgttgatgatcttgatttattacttggcatatttatcgctcaatatgtataatacgtatataagtattatagtgccagaaaaggtgaaaaatatggctgaaactttatataaaaaggtcgttaaaaatggttcttccttagctatcaatatcccagctaaggaagtaaaagagcaaaatctcaaagtaggcgatattgttgaagtaaaaatcaaaaaatcagaccgtcctaattctgaaaatttaaaagaaatagatggcttaatttctgattactgggatatgttagagtacttaaaggataagtagtcaatgaagatcaattatctaacagaaaaggatattttagtaatcaatgcaagggttattcaaagagaaggtgcaacgggacaaaaacctcacgttagggatgcagaagcccttcattttttagttgttcaacctaagcaaactagttttggacaagaattatatccgtcttttgctgaaaaagctgggattttattaattaaattagttaaaaagcatgtttttgaagatgcaaataaacggactacagcaattgcattcttactatttttacgacgcaattcttatgaactaacctgtgattggcaagatttagcaaatcaaatcttaaagatcgctcaaatagatgacaatgaactaaattaccaagaaatctatcaatgggttaatcaagtaattcatgaaaactaaaaataatcgatatcattttcgccctaatattatattttatatgaaataataaccactttataaaaaaataagggctattaacccttattcataataaatccatcaactatttcctatgtcatactactactcgattgtcctgcataaccagctagtgtagcctgcaagtcatgaataactttaggagcattaaaatttttagcaaattcgtactgttgcaattgataatataatctagaaccgatatataaagcagaatcattattttccgcttgatcaattgttctatccaaaattcttaccaaatttggattatcaattacatctttactaaaacgaactttttctagttcattttttaactttaaagtctcatccttcttaatcattatttacaccaaaggatgcgcaaatggtccatccttctgccatccagtatacataatacgaccaacgctatcccacatttgtgctaaattatcatgacaataatatcggttgcaatatacaccattaccatagtaatggtactttccgcctccgcgcttgtgatgtgtaccgcctaaaacttgacttaattgattttcttttagttcttgaaactttaccattccagacacctccgataaatctttaagcctgcctcacttagtacttctatcaacttacatatataagtctaccaaaacagtagtgttttctaagaaaacgtcagaaactggcaacgttcatatcatattctgttaaaatacataatttgatcaagaatttagtacctgtcgatttaccaatcaaatactccagttacaataccgttagcacccactgctgcatatctttctagtttcagctgaagttcaactatagctttaggtagttcattttcactaaagttttctttcaatttcaaagacaaattagaagcaatcgattgaattgactcatgcttatcagctttcgcaatagcagcttgtaataactcaaccaattcggcatttttcttaacttgaggatctgaaatcactgtattcaatctactcttaaatgcagcttcttctttaagattctttttaaagaacatatttatctccttgtattaaccttgatttttcagaaaatcatacaactcagtagctgtttttcctccacctacccatgcgttagcaatttcaccgtttttaattcgcataacagtgggagtacctggcacttccaagttatcaaaagcataatctgcattatctttactttcatcaatatttaaatagtataattgaccaccaatcagattattaaattcatttaaagtggctgaatattgtcgacaataatagcacgttgggcaaccaatatacaaatatctatcaatattacgcgtggtgctagttaaatcgttttagttaataaaaaagtccaatcttgttagactcgacttgtaaatagtaataatagaaaagagtctgatctgattgaactgccttaagcttaagcgttttagccaccatttacaagttagttttaaagatttagtgataatttgtcggcactggtatcgtttgtatgcaccggctgagtttactcatcggcgaaatattgatcaaattaaaactacggacagtctgattttggctttacttatctggcaagctaagacaggaattgaatcacaaagaagattctgtgaatgtttcaattgtttatcacactcacgttttaatcggcgttcacgtcagctattgcaattgatttatcagatacggcaagaaatgaataaaaaggttgacctgaatggacagttcttgatcattgacagctttccggtacctgtttgccaaccaattcgaaactatcgtgctaaaatttttcgcggttatgccaacattggttataaggccaccaagaaaatttacttctatggtttcaaagttcatgccattgttagcgatgacggttacattcttgattatgtcgtaacaaaggcatcagttcatgatgccagggagacagttgaactgatagaaaatacccatccatctaattactatcttcttggcgacgaaggctatttaggcaaagaactgcatcaacagctaaaacaaatgggttacgaactttggacaccatatcgtaaaaatatgacaggagctaaaaagcacaatgatcatcaattgatggctattcgcagaacaattgaaagcgacttttcgcttctgacctattacaatgccgagaacaatcgagcacgtagtctgataggctttcaaagccggttggaaattgcaattttagcttataatttggcttattgtctagaacgatttaactagcaccacgcgtgatgtatatgttaacaatatataacgataacatggatattgaattaatttggttaaaattatacatgtaagttgatgatgcgcttagaagtactaagcgaggtagacttaaaaatttatcggaggtataaaaatggaaaatactgttggttttgaaaagttaagttcaaacgaattggtaagtgttgtaggaggtagtaaaggatggaacaagttttggaagtcggaaggtaagtattggcgtggatttaaggaaggactatgtaaatatgcgaggtgaggaataattatgaaaaaatttgaaagtttaaaagatgaaaacttactagaatgtgtaggtggtaaaagaggctataattgctataaatttggtaaggatgttggtagaacagtaaaacttgtggcaccaattgtgattccattgttttgctgctgagatttttgtaggaatataaaactatgaaaaagcaataaaaatatacaaatatttttattttattaattttaggtattttagctataaattggcaagttgtagcgtctccaattaagaaactgtcaaatcttttgtgtaaatagttctttctcgtaaattgattttttaattatttatttaatcaaagtaggattctaaggtgtcctgaacctgaccaaagcctttatgaattcgattgaaataacggtcattgtagctcattgcctgaatgccaataaaagcatcaagcgactgttcagttggaaactctgccttaggcttagctttgcgcttgatcacattgttaaatgattcaatcatgttagtcgaataaattgaagctctgatctgcttgggatagttataaaagaccagcagatctggttctatgtctttcaagcttctgataacatggctgtaaaccttgccccatttggtatagaagtcatgcaggacagctgtggcttcttctttgtttgtctgttgatgcacctgtttgaattcgttcatgatcttttcacgatcgtcgacgcgtactttagcgcagatattgcgcatgacatgaaccaagcagcgttgaaaatgagctttaggataagtcctggccaaggctgttttcatgccaacaacaccatcagaaagaaaaagctcaacttgctttaagcctcgggatttcatgttttgaagcatatctgtccagacttcaatgttctcgctaggtgcaatgcagtagtcaatgacctccttgtgcccattaggcttgatgccaatggcaatatagactgcttcacgctcaaatgtttctcggcgcaaaggaaggtatgtcgcatccaaatagacgcagaaaaacttgtcgcttagcttgcgtttgtggtaagcctcaacctttggaatcatctgcttggaaatatttgatacctgggctggactgtaatggctgccatacatcttttcaattagatcggctatttccctggtggtcacgcccttggagtaaagcttgataatcatgctttccaagatatccgagtgctgcttgtagccaggcagcgtgtgctgatgaaattgaccgttgcgatcccgaggcacttgcacttcaattgggccaaattgcgtatcaactttgcggaaataagcaccatttctagagttgccagtattccagccatttctggcatagggatcatagcccagaaaggcagtcaattcagcttctaacaagttattaacagcctgttgtagctctttgcgcaataaatcatttattttgtctggattgaatagagcttgagcaaaatctttggtaaaatcattcatgaaggagttcttctttctgtatgtgtttttttgttcaaaccaatcatacgagaaaggaactcctttttctaatgtttaaagaaataaatttaaggaatcattcatccttacacaaaatattttacagtctcttaattcagatgaagtagattcttttttcgataaaaaagataatattgatacgcgtggtgctagttaaatcgttttagttaataaaaaagtccaatcggactagactcaagttgtagtatcaaaaagaaaagagtctgatctgattgaactgccttaagcttaagcgttttagccaccatttacaagttagttttaaagatttagtgataatttgtcggcactggtatcgtttgtatgcaccggctgagtttactcatcggcgaaatattgatcaaattaaaactacggacagtctgattttggctttacttatctggcaagctaagacaggaattgaatcacaaagaagattctgtgaatgtttcaattgtttatcacactcacgttttaatcgacgttcacgtcagctattgcaattgatttatcagatacggcaagaaatgaataaaaaggttgacctgaatggacagttcttgatcattgacagctttccggtacctgtttgccaaccaattcgcaactatcgtgctaaaatttttcgcggttatgccaacattggttataaggccaccaagaaaatttacttctatggtttcaaagttcatgtcattgttagcgatgacggttacattcttgattatgtcgtaacaaaagcatcagttcatgatgccagggagacagttgaactgatggaaaatacccatccatctaattactatcttcttggcgacgaaggctatttaggcaaagaactgcatcaacagctaaaacaaatgggttatgaactttggacaccatatcgtaaaaatatgacaggagctaaaaagcacaatgatcatcaattgatggctattcgcagaacaattgaaagcgacttttcgcttctgacctattacaatgccgagaacaatcgagcacgtagtctgataggctttcaaagccggttggaaattgcaattttagcttataatttggcttattgtctagaacgatttaactagcaccacgcgtataaaaaataaataaatctactattggtgaaattaatccctgtatcgctatcattactttaatccaagaaactttttccaattaaagtgaaacaatgggcgttttgacttattaacaatattattcattgcaaacaaattttgattaaaaaccatattagtaatagcaaatccacctttaacctcaactagctcttcttcattcaactttttcattatttatgcttcctttcaatttaatgcactaacaatttttacactgttaatgttactacgagcgcaactttatgattaaaatcgtcatattctgtaccatttagatcatattctgcattttcaattaaaatgctcctccaccagaaccatttccccaactattcgacttcttcttgaaaaaatagcgtttagattttgatcgtccacccacaatttagacatgaactagatagcttccgcatattttctcttcccttcatttaccattttgttacaaataaaagcataactctatctagcttctcaaaattaagctcatcagattttgcattatcctaatcatattttgctaaaaataatcaatcctctttctcctctggccaaaaaagatcatctaatgtcttatccagcgcctggcaaatcctgatacacaagttaaccgacgggttataatttcccttctcaatcgcagaaatcgtctgtcttgaaacatcaatctgctgcgccaaatcttcttgcgttaaatctttaccgactcgcgcagccttcatttttaaatttttcaatccttatcactttccttatcacgatggagttgaaacaggcttactgctccaataatcaaccaataaatccccataatgttcagcgcactgttaaagtcatcaatatatcctagaatcaagcaaataccaagtaaaatatatagccaactatttgccttaacatgctcttcattaaatgcaaaatatgctccatggactatatcgtaaactgacatcaccgttaatgacaacataataattgcaaagttaacagcaataccatgctttgtataaaaatccgtctgcatgaataaagcagaaattacttctccaacgattaacacaagaaagctatacctgtcaccacgaccacgaatcaattcctgtcgttcatcatactttgccgcacgacgatttcccacgaatacaacgactaagatgaaagtcataactgcaaacaagcttgcaaaagccattaattttaatatttcaaattttgacattttacacatccctttcttttaatagtttgatattaagcccatattttcaaaatgtaaagtatgttttacatttttactaataaatttgtatttataaaaactagcattaacataatcggtatcatttcactagatttgataccgattatttgttaatgatacctatttttcaaaaatttccttgacttcttcttttaatcgtcgtattataatgacaattaaattaataaaagcttagaagagatgagtaattacttaagacttctgcagagagtcggagttggtgcaagccgatgtggttgagagtaatgaatatggtcttggagctagtttaaagagcaagctgttaagtaagcaatttacgagtgacgatcgttaccccgtccgagtattcccaattttgggagcacttagtaaggagttagttgtgaagctaacttgaatttgggtggtaacacgcttaggcgtccctagcatagaaattctatgctaagggcgctttttattttgcttatttaatttttcagaaaggagccagacaatggataaacctatcaaaactacaagttcacaaatcatcatcagtaaaaaggcattcaaccgaatgtgcactattgtctggttgatcttgatcatcatcggacttttcatcgttaaataaaacatcgaagcaaaactaaggagaaaaattatgacagaattacattacgatatcgttggtagctttttaagacctgcagaattaaaaaaggctcgcgcagaatttgaagaaggaaagattaagcaagaagaattaactcatgttgaaaatacagagatcagagaattagttcaaaaagagattgatcatggccttaaaatcgtaactgatggtgaattcagaagaagttattggcatcttgataccttctggggctttgggggtattaaacacactaagcaggcccacggctatttcttccatgatgaagaaactcgtaacgactctgcccaagttgagggaaaaattaaatttactggtaaacatccagatctttcatcatttgaatacttaaaaaaggttgtcgatgaaactggcgctaacgtaattccacggcaaagtattccagctcccgcacaattttacgcagaacttgttcgtggagaagaaaatattgccgcacttaaaaagatttatagttcagaagaagatttactcaccgatatttctaaagcataccgagacttaattttagccttatacgatgcaggatgtcgcgacattaaactcgatgactgtacttggggtatgattgtagataagcgctattggaaaagtcatttacaagatgacttttcactagacgaccttaaaagaaaatacttgaagcttaacaatgatgcaatcaaagatttgccaacagatttgcgaatatcaactcatatttgtcgcggtaactatcactcaacttgggcagcccaaggaggttatggtccagtagcggactatgtttttgctaaggaaaatgttgacgccttttatcttgaatttgacaatgatagatctggcagttttgacccaattgcacaaattcctaacgacaaacttgttgtcttaggtttagtaactagtaaaaaagcagaattagaagatccacaaaaattaatcgctagaattaaagaagctgctgaattccacccactaaatagtctcgctttaagcacacagtgtggcttcgcctcaactgaagaaggcaacacgttaaccgaagatgaccagtggcaaaagatcaagttggttgtcgacactgccaagcaagtttggagctaaatggcaattaactagttaaaataaagataaatagatttagacaaaggagaaaaaaatcatgggaaaagttgaaagttttgaattagatcatactaaagttaaggcaccttacgttcgtttaatcactgttgaaaaaggccaaaaaggtgaccagattagcaacttcgatttgcgtttagttcaacctaataagaacgccattcctactggctgcttgcacacgattgaacaccttttagccggtcttttacgtgaccgcatcgacggctacattgactgttcaccatttggctgtcggactggcttccatcttttagtttggggcaccccatcaactactgaagttgccaaggcacttaaggagtcattagaagaaatccgtgacaacattaaatgggaagacgtaccagggacaacgattgaatcttgtggtaattatcgcgaccactcattattctcagctaagcaatggtcaagagatattttggctgaaggcatttctgatgacccatttgaaagacatgtggttgaataaaatttaaaggtttaactgaaaaatagtaaataattaaaaaagctagcaattcattttagtgaactactagctcttattttttcacttatatcatcccggcaactaagccaactatatacaagaagacacagcagactaccaaatacaaaccgccccacttgaccgtttcttttaggatctcgccttcgtctccctcacgattaattgagccggttgctactgcaatattctgcggtgaaagcatccctgccgtggcccctgtcatgttcgaggctacaacccagtacttacttacgcctaagtccgttgctgcagtatactgcaaattaccaaataaaacattagctgatgtagcagatcctgttaaaaatgttcctagtgcaccaattaacggcgcaaacaatggataaactggtcctaaaaggccaaccaaggccactgctaatgcattcgtcataccagcataaaccattaccttagccaagcctacaatcgcacaaactgtaattgtagttttccatacgctttttatcgattgtcctaatatttgcatcatttttttcaagctgacaccctgaatcgccccaccaattaatgtagctacaaaaattaatgttccaggagaagataaccaactaattgacaatgtatttgggttctttcctgtataaacaacaagattagtggttactttattaagtacatcattgacagctggaactaatgaagaagcaaagatcacgaagataaagaccaaaataaatggtgaacatgccttgagcatttccttagcatttggacgtaaaacatctggctcttcttcatcatcatgccatctagttaataagactgtaatcgcaattgaacacaatgagccaacaattgcaggcaattctgcccctacaaattttgcagctattacctggggaatagccattcccagtcctgacatcaatgtaataaagcctacacctttaattgccttaatgctgccttcagtcaagataactaaaataaatggtaccagtattaccaaaatagataattgcaatgttacgatgaaggatagtttttcttgatgtagacccgtcacttcagctaaagttaaaactggtaatccaattgcaccaaaagccgtcgcagttgtattagcaatcaaactaatgactgacgcgcgaatcggatccaagccaaaggcaatcaatattcctgccgcaattgctaccgcagtcccaaagccagcgattgattctaaaaagccaccaaatccccaagcaataatcaaaacaataatccgcttatcggttgaaatcgtcgccagcatattttgaataatttccataccgccagattctgtagtaacgttatatgcaaataaagccatgacaataacaaacataatcggccaaatgcccatgataatgccttctagcgccccacttgccgtatctagcaccggtactttaaaactaaagactgctaacaccatcgtcaaaattaagccaatgacacaagcgcgtgcagctggcattcgcataactcccagcgaaataatcaaccaaacgatcggcaacaatgcgatcgcaaatctaatccacatcaaaatcctccatcatcaaaagtgttgtactatattatttaatcatgatttgggtaaaaagttaaaataagacacaaaattttagtttaaattacaattttcacaaatttcacttgcaagtttaaccaacaaactatataacaattaatggaaagtaaaatttctcacatcatgtttgaactactccgtggaatagagtagttctttttttgcgtaaaaaaatagccagaccgaattcagcctgacttctgttttttttagcgatgtttaattacgtgaataccataagcgattaagtaaattaccacttcgatcgttgcaataaagaaagttaccggccagttggtgataaagccgagatacagtccagcccacacgccaactaaagcgaaaaacacggaccaactgatcattgctggtattgttttaccaatatagcgcgccgttgaagatggcaatgttaatagaatgaagactagcaatgaaccaacaatctgggcaccgatagcaactgacatagccaaggctaccaagaaagcaataccaacccagccagtatgtacaccatgtgcaacggcaccgatatggtcaaatgagtcaaaattcaagcttcgagctaccaaaataattaatagtaaaactagaattgacaaaaccactagctgaatcacgccttgtttatcaacaccgatgatactaccaaacagaatattagtagcgtaacggctatttgatccagaaatggctaagaacagcacacctagcccaataaacagagctgagatcgcactaactgacgattctttttgatcgctgtgcaaggacaattctcctactccaattgaaccgagcaaggtaaatagtagcatcccccataacggtgcaatgccgataaagacggcaaaagctgctccagcaaagccgatttctgacagtgtgtgagctaaaaaagcataactccgtgctactacatatacaccgaccacgccacaggtaatcgcaatgaatgtactagctaagaaggcataacgcataaattcgtattgaaacattattcgaaatcctccttaaatttatccatctttccttgcctgatcgttcccttatttaaatatagataatcagtcatatactttttagctaaaggaatatcatgagtgacaaacaaaacggtaattttgtgttcacgattcaggtgcttgattaatcccatcaattcttccttagcagccggatctaggctagctgttgcttcatctaagatgatcatattgggatgatcaagtagagcctgcgctaaatatgcacgttgtttttgtccacctgatgcctcacccattcgggtattctgaatcttttctaaatgagtttcttctaactgatgatcaatctgttccttaacctttttggtcttaaacaatggggcgttaagtccaataaatgcacgaatcgacaatggatactccgcatcaatatttctaaactggggtacataacctaacttaacgtctgaatcaaacttaaagttgcccgcagtcggctttaacatccccattaaaatcttaattaaggtggtcttccctgttccattaggtccaagtagtgcagtcattgacccgtcttcaagctgaaaactcaaatcttgaaaaacatctttagtatcaaatctcatcgagagatcatttacttctaaaatcactcttctaccccctccctaagttgctattatttttctattttagccaaattttgataattttctttcatccaagccaagtaagtagtgtggttaggaatagtctcccgcacatttaacactggaatattattttccttagctaattttacaaataacttcacagttgaactgcttgcctgtgtattgttaacaaagaatgcaatcttttttgctttaatttcattattcatttgattaatcatcttaggactcggatcagtaccattctcaattgcttcttcaaagcccttatccccaatcttgtatcctgcttctcttaaagcataatcaaagacaggttcactaacaaagactggcttactatttttcttattagtcttcaccaattgcttaacttgattaatcttagctaaatacttgtcaccattagctttaaaataagctgcatgctttttatcaagcttagataaacgcttaactaggtaattaacatacttggttggcatacttagattgtaccaaatatgcggattatcccccttctttaatcccatcaagtcttcaccaactaagacaggctttttgctaacagaactagctagcttattcatccaagaatcatagcctaagccattagcaacaataatatttgccttggtcaattctttagcatctgccgtagttggttcaaaatcatgaggatcggtactgctattgctaatgattgccttagccgtaccatattttcctacaacatttttagcaatatctgcataaacattggtggtggtaataatcgagacttcacccgaattgctcgtcgaatttgatctattcgagcaagctgaaactaacagcgcaataacgccaattagtcccaaaaaagagattaacttcgtaattttagatttcgcattttgcataaaatatcctccttgtgcaaaataaaaaagcatttaagttagaaaattcagcataaattctaactaaaagttagaataatctagttaattacatatgtcaacatatttttgcatagacaaatagcaccagtctcccataagcctgatgctatcaataatttaagtcataaaattttgctgaattttattaaatgctttgttctaaaattacattattatataaacatatttttatataattgtcaaactaaattaaaattcttccttcacgtgctgacgcaaaacatctaagattttaatcacatgcttatcttctaagctataatagcgctcctgcctaacccgctcgctcttaactagcttagcctcttccaaaatacgcaagtgacgcgaaatagctggctgactaacatcaaactgcttaactaaattattaacactacttttttgattatcatttaaataatataagatttgaattcgaatcggatgattcaacgctctagtaatccgaataatttgctcgtccaatttcttcacccattcatactttttaatttattatagcttaaatttaggtataaaaaaacgctacccttcgggtagcgcaaaacataacagagtatcttgatttaagtagagatcatcaagatatttatattataatacgtttttgccaaaatgtattgttttttgattaataaccagaattatttaataataatattcgatattacttatagtattattcgtttgggtcttctttgacattcttcttccagaaactcatgattaaaccagcaacgattgaaccaataatagtagctaggaagtagaataagatgtggcttggaccaccgatgttaccagcaagtggtgatacccaaagaccaccgtgaggagctgggacaccaacgtgccataaaccaactaaagcaccaccaacagctgaaccaatgatacatgatggaattacacgacctgggtcagcagcagcaaatggaatagcaccttcagtaatgaatgagaagcctaatacccagttagaaacacccgcacgacgttcttctacagtgtacttgttcttgaagaatgtagtaccaattgcagtagcaaatggtggaaccataccacccaccattacagcagccatcaagatagcagcagtagctgagtgagggtcgttagcaaatgcacctgaagcgaagacataagcagccttgttgaaaggaccacccatatcgattgacatcattccggcaaggatagtggtcaaaagtaccaagttaccagtacccattccgttcaagaaatgagtaatagcaaagttaatgccactaaagattgggttaatgatgtagaacataattgctgcaataaagagcaatcctaaaattggatagaacagcattggcttcataccttcaacagaacgaggtaatttagcaaatactttcttcaaaccaaccatcaagtaaccagcaataaaaccagcagcaataccgcctaagaagccggctggtgaagttgcgtgagcttgaacgttaacttggaattgaccgttaacaatagaggccatgtaaccaccaacaaaacctggcattaaggctggcaaatcaccgattgattcagcgatataggctgccaaaactggaaccatgaaggcaaatgccaagttaccagcattgtttaaaaagatgaaagcaggagtcttagcgccacccatgtagttttctacgatgaatgagatggccattaagataccaccaccaataacgaatggaagcatgtgactaataccattcatcaagttcttgtagatacctgcccacaaacctggcttctcagttgatgaagattcagttgacttgtcttgagcacttgcacggtaaacatcagccttaccacccataatgtcatcaatcaattcgcctggcttgttaattccatcaacaacaggacggttaactaagtgcttgccgtcaaaacgtggcatatcaactttcttatcagaagcgataataacacctttagcacgcttgatttcatcaggagtcaacttatccttaaccccttctgaaccgttagtttcaattctaacttcgatgccgcgcttcttaccttccttaatcaaggcttcttgagccatgtaagtgtgggcaataccgttaatacatgcagtaacaccaacaatcaatggcttgttgtcgtcatcacttgtaccttgagccttagcagcttccttagccttcttagcttcagctgccttcttgtcttcttcgtcttttttagcttcagccttttcaaaaagatcgataacttcttcaggagtcttagtattcttcaaagcttcaactaaatcaggatcaattaacaaacctgaaagttttgctaatgcttgaaggtgagtattgtcagcaccatctggtgcagtaatcatgaagaataagtgaactggttgaccatcaagtgaattatagtcaattccttccttactcttggcgaataatacgcgtgccttgttaatagatttgttacgtgcgtgaggcatcgcaattccgccaccaataccagtagttgattcgttttcacgtgcccagattgacttaataaaagcatcttcgtcgttaacgatatcagttgctacttcaaggtcagccatttctttaatggcatcttctttgttcttagccttaagctccataatcatggagtcagggcttaaaatatccttgattctcatatttttcccctcgttttttattaagaaatttgctcaactttgatttgtggaagaacagcatcaatttggctcttaactgcaatgtccttagtaaaggcagtagcagcaccacaagccattccaattctgaagccttccttaggatcttgggtcttgtagtaagtaccaacgaagccggcaatcattgaatcacctgcaccaactgagttaacagcagtaccaacagcacccttagcatggtaaacatgatccttggtaagaaggaaaccaccttcaccagccatagaaaccatcacattttgagcacccttatctaaaagcttttgtgcgtattcaagcatcacatcacttgaatcaaaagttacgccaaacaagtctgctaattcatggtggttaggcttaattactagtggcttatatgccaaagtatcaagtaaagcttgtccagtagtatcaacaacaaattctgcacctgcttctttaatagtaggaagcaatgattgatagaaatcagttggaaggcttggagtaagagaaccgctcattactacaatgtcgcccttctttaaatcgtttaaacgatccttaaaagcagtgatttcttggtcggtaatgttaggaccagccgcgttaatttcagtttccttttcagcgtggatcttaacattcacacgagtgttatctgaaatagtaacgaaatcactttcaattctcttttgattcaattgacgaaccaattccttaccagtgaagccacctacgaagccccatgccgtattatcaacatttaattggttaaggatttgagaaacgttaattcccttaccccctgctaaaaatgaatcattgttagttctgttaacttctccgcggttaactttttctaattgaagaacatagtcaagcgctggattaacagttactgtataaatcatcctattttgcctcctctaattcaataccgactggtaatgaccgtttttgacctggttttagttgatcagttaccacaatcacgtcacttgtattggcaaacacagcaaagttacgctcaccgattttactattatcagttaatacataagcgtgtcttgcctgtttgatttcggctgccttaaccgcagcttcctctggatcaggtgtagttagattgccatttttttcaattccattagcaccaacgaagctagctgaaaaattcattgccttaatctgacttaaggcggtctgacctataacagcatgcgtatcgtccttaacttcaccgccaattagaattgtgttaattccgtgatttaaactgcataaagcagtctctacaccattagtaataatcttgacgttagcaacctctgctaaaaatggtaccatctcataagttgttgttcctgcatcaatgaagacattgtcacctggacgaacaaaattctgcacggcatatctagcaatagtgatttttgcgtcatgattcaaactgaagcgaacgttttgtgatacatcacgagaaaaatgtttaactgattgggcaccgccatgaacacgcttaaggatcccatttttttccatctgaattagatctcgacggatagttgattcagatgttgcggttaagtcacataattcacttacgcgacataactcgtgttgattaacatagtcttcgattaagctttggcgctcctgagtcagcatcatttctcacctcgataaatattgtattcgctttctcctccaaaatcaatcatttttcttcaaaaaatgtcatttttatttattatcgttcaataacattcatttatatgcaaaaaagatgccgttttttgattgaaacgacatcttttcttcgtcatttggaattattcttagtcgttttaccctatttgactaagaaagagaaccaaagatctattaaccttgcaaaagcaaaacacgctgaatcattattgattcagcgcgttttactattaaatatattttgtctagcctctcaagctacgcttaaagttttgccatgggccgacatcatctgtttgcaaaatcaagtttggatagatttttctaatccagataaatgacgctactgtagcggctaaagcaattaaagcagagatagctgcctctaaattagttgcgttacccataattactctagctggcattacaaatgatgatagaaacgggatgtacgataatactttagcaaaaatcgtatccccacctgattgcatattgactgtgaacaagaacccgatcaacatcaatgtagatagtggtcccaccgctttgttggcattctcgcttttagcaaccaaagcgccacagaaagctgcaaagataataaacaataccaagccgattatcgtaaacaccaatccccaagaagccagattgccaattgcttgatcaatcatcggcttatactgtctaaataaatcgctaaagccatcgatgtatggggccgcgcaataaactgccacaaaaccaacaacataaattaacacttgggtgataatttcaccaaaaatacctaaaatcttcccagtgaaataatcgccacctggcatactcgaaaagattacttccattatcttggtacccttctccgtagcgatatcttgtgctgttacttgcgtataagtgatcacaagcatgtacaagataatcagcaaaacccagaaggaaatttgcttaacaggatcattatcaaagctcttcttatcaacatgcttaacttgttgcttaaattgcgctcgcgtagctaaagactgagtctgttttgtcgttagcttggccttacttaaattcaattgttgctgggcggtgtttaggctagttagcagctctgattttagatcactgtccattttttcatcactatagtaagttgcagctaattgattattcttttgttcaattaaaacatagccatcgatatcttcatctttatacgcctttttagccttagcttcagtgctatagttgtcaaagtcttctgactttttaattgcttgctttaaggcagaattagaagtaactaccccgacatagttgtcatcactgccgccagctgataccattccgataacaaatgaaaagaagacgagcagaaacggtgctaaaatcatcagcaaatatgaccaagttttcacttctctacggtaggtttcttttgcgacaagccagatcttattcatgacgcgcacctgctttcattttgaaaatctcgtctaaagttggaggttcctggtcaaaagtctggatatattgaccggccgaaagttggttaaaaatatccttaccatatttttcgtctgcaagaataagcagcttcattccattgttttgcaaaattatatcttttacacctggtaaggctgataattcagtagcacttttgtctgtcctgacaaaaattcgagttaggccaaagctgttcttaatttcatttactgggccattcaagacgatatgcccatcattgatcattacgacgtcatcgcacaattcttccacgttacgcatatcatgatcagaaaaaatgatcgtagcgccttttcttttttcttccaaaatcagctgcttcattagatcaacattaacaggatctagtccactgaatggttcatctaaaataatcaatttaggttgatgaattaaagttgcaatcatctgtactttttgttggttacctttagacaaagacttaatcttatccatggggatccctttaacagccaaacgtgataaccaatcaggcaattcttcttttacctttttagccggcatccctttaaggctagccaaaaacactacctgatctgaaatagttaacttaggcatcaaacttcgctcttcaggcagatagccaatattgtcataatctttagcgttgaaagaatgtccatcaatactaatctggccgtcataatcaacgaatttcaaaatactatgaaagatcgtcgacttacccgacccatttttaccaaccagtccaagaatacgcccatctgacacactgaagctaacatcaaacaaaacctgtgttgacccgaagcttttatttaggtgttctatttttaacataatttttcctcaactttttatctaatggttattagacctagaagtacaccgtcaaagaactgccataaagtatcggttgaaaaaattgtttttacaatatcaactgacccccaattggttactaaagtaatcactacaccagctgaagcaaccactactcctgtaccaataacttgaggggcaagtttcaacactttcttctgccatggaatctttgatgcgaccgttttattaaggactaagcttgcggacatgatgccaccaaacattagaccgaaagccaatccggctccaatcgacataataatttgaaaaggttgaggcgaaccagcagtcttaacatacatcatcacaagagctaatattggtccaacaagtgctccaattcccatgccttcaataattcgtttgttttcacgagcaaatttttcattattcattgttcttacctcaaggaaattttcagctaattaaacaaatccgaaaacttagtcggaatgttgttcttggcgaagtatttcttgaatgcatccccaaaactcaattgatctttttctctattttcaagcaaatcatgaacagctaagaatgctgtaacggcgtaattaacggctaaaatgattaacaaaccgagcacaatataaattaagtacagcattgttctttcctccaattcagcgattatctcccaggaaataatcttttatccttttaaattaatcatatccccatcatttatgtaaaaggtaaaaccgtccaattctgtcatttttcggactgattttgcattttattcttcatcttttttataaactaataaatcccctggttgacaatccaagacttcacagatcttgctcaacgtgtcgaagcgaacgccatgcgcctttcctgtcttcagaatcgacaggttagccggcgttataccaactttctctgccaactcctttgaagacatctttcgcttcaagagcataaaatctagtgtcacttcaatcatctatatcaacctttctaaataatcgagtctgcatcctcctgaaccttcattccgtacttgaataccaagtagactacgtatagtactgctaggaaaagcaaaccagttgtcacaccacttgggtatagtacattattcgaggatttagcgaaccaagtgcggtgagttatgaaaataatgtaatctattattgaaataagggtatatccagcaactgaaattaataatttcttgagtaaattcaaattactatcagcaaagtaaacttcttgcttgatattcttaacaattaatctggcatatcgacagattaaaaaggctgcaacgctcatcatgatcagtgatagcaacacaaccactattgcaccgatatagttatcaactgatacgccttttatacccctaccactttcaaagccagcacgaaaatccggattatgtataccaaataacacaacacctcccataacgatccacataattattcctatcacacaaaatatttggtaaatccaagcaaaaatcgtaagcaaattcaaaattaattttttcatttttctatcctctcaaaatatggatgattctgtatatagcactgccaattacacccgttactccaattactaataatgtaattctaagaacactccatgttccgcctaagttagcaaacactaagattgccatcattatcagcattccaataattgaacctatctgtcttttcttttctggaagcatatctatccctctcttccataaaactatctatctctttctcgtcttttataattattgtattacgataatttataattgcaatacagaaataaaatatttttttgagataataaaaaaataccaaattagtcgttaaactaacttggtattatgttttatcttccaagctactgctttttacttttcttcttatagtaagagttcatgaaaatattcataaagataacaaaggctacactttcaactatattccaaaatactgttccaaagcttaatgttttgtactgaaaatagtcccataccaatcctattaacagggccaaaataccagcgatgatacttctgtttctaacttggcgctcggttaaaattttatttttcataatttttaccccattattatcatatcgaaaaataggaaatctattaaccgaattttctattttttaatattatctatgtttatgttttttatgtctattttgtttggcgaaatctttaacagcgccttctacacatccttttatcataccacttccgctagggagcgcatcaatgaaacccgataaacatgatccacctacaccaagccagttagtgccaccacttactttttctaattctttataattcatttctttcatcataaaagttacctccttttttacaaatgtgatacacaagaaactgatccgctaataatacccacattagcaccaaatatagctccacctactgtaccaattggagtaccaaatgcagtgcctgcaatgccatattttagtccatccttcaacgctcccattccaatagctttagcacaatttgtgatttttctacggcgtcttgctttaccaccgttaccaccgaaaacagctgacagttcttcataagttaaagtttcaaatttgttcatgtttttcccctttataaaacttctaattacaattttcataagtgaattaagttttacctctcttcaacttacacactaataatacaaaacaatttaccttcattggcgtataataccgatttagcacgaaacaagatctatttggaaaatatttaccaaatcggccaagttttcgtatattagtaatttacaaaggattcttattaattgttacgctaacttgatattctgttttataaatccgaaaactagtaaaaacatagacacaatgcacttattatgagaatggctaacaaaaaaatcttctcatagccaaggctacaagaagattgccatcacattaatgcataaactgatacgcacgctctttactttaataaaacatgatcaattatacgactataacatagccactcaaaaccaaaaacttgagtcgaaatcaaataatcatttttagcatagtaacctacgaaaaaaatcacaagtttcataggtttctttgcgttatcttctaagtattacgatattttctattggagatatttttagcctattcgcaccagtatttttttcaatacttatctactagttattatctacctctatgaaaagaactttggaaaaacttaggattttccaaataaacgtctcgtttatgattaccacctttcttactgtataaaggtagcatgtgttcagtatcagttagaccaatatcatctacagaacctgacccacctaaaattccgcttaaaagtacttcatctttagaaataatgattcgtttcatctacttttcctccttagttttctttcctaatgaaatgcccaaaactaaactgattaagatactaatcattccaattaattgaccccagatattatccttctcacctgtagatggtaaagactgagtagaaccatttttaatagtgtcattttccaatcgctttaacttagtaattctattttgattgttcttaacggcactataaggcttgctttgcacttttactgaatcaaattgtttattttctttcacacttccgtgtttttcactaactgctgctagaataatattctttttatgcgatttagctgttttcttgaccttagtggctacgattttaggttttactggcttcttcacagttttcttcttagtttcagctctaggagccgcatactcttgattacctgtcgtaactttagtcagatctgcagtagagctagcaacatttgcagcattctcaaatacgctattttcaacaaagtcagtaatagcaacgtcattgctagactgtgtttgatcatcttcagctacagtcacttcaggtatttcattactttcagattcagtagtattatcatccttcggttgatccttaattactgcctgttccactaatttattagctgcatcagaatacaaaaagttatataactcttgtcccgtcttttctccaccgacccatgcactaataatttttccattaataaatctcattgtagttggagtacctggaataccaatttctttgaaggcatactcatgtgctccttcttcagcatcaatattgaaataaagcagcttacctttaacgatttcattgaaatcttttaaatcaggtgaaaattgtcgacagtagtaacatgttggacgaccgatatacataagatgttcttgattatttttctctgctagaagatcttttacttcttgcatttttactctatgaaaatcttttacattgttctcataatcttcaacagatacctcatcttcatcatcttcactatcttcctcatttgcattattaggatcttgattattagtattctgtgactgattattttgatcttcagaagctgctggctcttcttcctgcttattttgagtttgagctgcttcgttcttactactagttttctgctcagattcggaaacatttttatcatcattttctgttttagatactacttcacttttattctcttgagaagtattaccttcatccgcatgcacaatagtactattcatcatcaataatactgctgggctcaacattaacattaatatttttttcttattcatagatcttcctccgtattttttataactaagaaaaatatatcaattatcagctatctttttggttatcagacttattcagtacactttttgaccaaatcagttatcaaaataattggaatttgattctaactaaaaaagagcttttcagctccttttaattttggttaagaattttatccttaaaatattcaaaatatgtactcttacctgtaataatagttgcgttgccttccatcccatatttcaaatttttcttggacttggccttacagattacttcatagacattatttccgcgtagattaatgggatatactccaatttctttcacttttcctactaatctatccattgttccactagcattagctacctgaaaatacagtgtttggcctttttttattgccccaattttattacctgggaaataagtaactacattgaccgttcttttagccttaatcatcggaaacaagtgaactgtattctcctgtttatcatcaagatgaactagccatttttctctatttcttctaacaatttgtccttcatgatagtttctattggcaatattaagtgtattttgtggttctacaattccggtagatgtaactgtactttgtctagttgcaaagaaagaaccgactattaagatcagaactaaaattgccataggaataataatcatagttgaaaaattcttgaatttataggaatagtattcggtactctcatagtctttattattcataacgttgctcctaattctcaactaagttatagtaaaagccatgtttctgcattaatttctcatgacttccttgctcaacaatttgaccatgatctacaaccacaatattgttagtcctttgtgcaattgctaaacgatgagcaataaaaataatcgttttatcttttaatttcattaaattatctactacttttttctctgtaatcgtatcaagcccgctagtggcttcatcaaaaattaaaattttagccggtgacaataatgcacgtgcaatagttagcctttgcttttgcccaccggataaaatcttggcattttcatccatcttggtttcaaactgcagtggtaattgttcgatttcagactcaatttctgctatctgacaggctttcaatatatctttttctgtaatatctggtcgactacctaagagcagattttctttgattgttcctgagaagatgtatggtgtttggggaacatagtttacgtatgaccgtaagacatgcttatctactttagtagaattaaatccattaaaagttaacttgcctttgcttggagagaagaaatcaactaaaagtttgaccatagtagacttacctgagccactcatccctacgattgccaacttatcattgggttcgatttttaaattaatatctttcccggatttaaaattgaagtgcaacactaagtgttaaacaaaaaggccatgaagacctaaacttgaagtgacgaaaaatcaagaaaggaagatcttcatgaccaattcaaattctagcatttctaagcactatcatcaattaaccagcgtacaacgtggacaaattcaagcaatgctggattccggcataacttcccgtactgttatcgctcaagaagttggctgccataagtcgacaatcagtcgcgaaatcaaacgcggaagcgtcctgcaaagagacagcagctatttattgtatgagcactattacgctgatactgcacagatttattatgagaagcgtcgcaaaaactgctatcagcgcaatccattgaagcattatgctgtctttttgagaatgctctccagacgctttaaagctaaatttgatgccaccagcatcgatgagttcgttggtgaattcaaaaggactatgccaggctacccttgtcccagcacaccaaccgtctatcgctatattgatcagggcttgctggacataagcaatattgatctgcctatgaagctcaaaagacgcaggaacaagcgtcatcacagccatggcggtcacgctttgcacaagaagcatcttggcaattccattgaacagcgtcctaaagagattgaagacagaaaagctccgctgcactgggaaggagatctggttaaaggcgtcagacgcaagaatcagcctgctttaatgactttgactgaaagaaccacacgctttgaagtagttatcaagattcctgactatcgggcaagcacatgccaaaggctgcttcaaaaggagattgacagacatcctgcctggtttaaatcaatcacgtttgacaatggctctgagtttgcggatatgaccaagatcaagggctgccagatttactttgctcacccatattctccatgggaaaggggcaccaatgagaactgcaatggtcttttgcgtcaattcttccctaagggcaagagcatgaaagacaagtcaaaagcttatgttcaacaggcaactgatgccattaaccacaaatatcgccgaatcctccaatatcacacagcagaggaactcttcaagcaatatatctcttcataacctaactgttgcacttaatttgacaattcaggaattaatatcttttaatacatcgactccatagccataatgatagtcaacatgatgatattcaatctcacctgctaattgcttggcatccctaatctgagcatctttctggaactcactcttaaccatgtatacttcattcaatcgattttgtgctacattagctgattgtagagttggttgaagattaataatgctctgaagtggatctacaaaatacgatagtaatgcgttgaaggtcattaattgaccaatgctcatctgcccgttcattacaaccttagcccctacccagaggataattacattgagagataactgaatgaaggtctttaaagctgactgcaaagattcagttttactgtaacgaaaagatttcttgaggtaatcgacgaattgactatcaatcttacgataacgtgtttgttcgctatttaaagctttgattgtttcaattccttgaatatcttcaattactgaagaacttaagacagcattactctccatctgatcattattcatcttttcaaatttcttagaaaagctaagaatcaccactgcataaattggcaaagacagtagagtaatcacaaatagagtggaattttgaattgccaaaactattcccatcacaattacaattgaaagatcaagaaataatgaaataactgtactggcgagtgcgtcaataattcgactagcatcagagaaccttgaggtaatttcccctgttctacgagttacgaagaattccattggtaattcaaaaatatggcgaatgtattgtaagttaagatcaatacttaatcgctgacctagaacatccaatagaaaattttgcccgtaagaaaagatagagttgaaaacatatgctatcaataaaccaatagctaggatcgacaaagtttggtatgtaccgctaggaatataagtatcaattaagccttgcaagaagtatgagctacaaatactaatgattgtcatcaaaagagcagccaaaataatattagtgactagtttcttttgtttgaacatgtatggaaatagtgaccacagattttgctttttctctttgagtggctcaaaatcatcatttgggaccataaaaagggcaattcccgtccattcttgagaaaacttttctttagacattttcgttaaaccaacgctaggatccggatcagcaatcactaaataatttttggttgccttaatcacaacataatagtggagtaattcgccttgctttaagacgtgtacgatgaaaggatattgaatgtctgcatcaggatcaaacaaggacatgtcagctttaactgcttcagtttttagattaaatgcttgtgctgttttaactaagcccagagcggtagtcccttctaaattagtgcgggctgaatgacgtaaatgggctaaaaatactctagaatgatattttttaagaatcatagctaagcatgcaactccacaatctgattcgtctacttgtggtacataaattgatttatactgtagtaacatcttttccactcctcatattaagttgaatccattatttcatgattggaaaactaaatgtaaaaaaataccaaatcggttattctcattaccgattcggtattttagttttctaactagattgagctactcaactttaatattttcaaatttatctacaagctttttaaccacggctttatacgatctagaataagttaccatctgaccattatcaaatataataatgcgttccttcgtgtcaattgcactaatgttcttaggatttaccaaagaagattgcgaaacttttgccaagaatgggttttctttatcaatctgagtaatatttgccttatactcaacttctccattctcagtaaccatatgtactttatgctgtgtagtactgtgttcaatgaaaagtatatcgccttcggccactttacatacgcgccgaccaatcttataagtaaagtcacgttgactaaacttaattctgttagataaattatcgaaggcgttacgtaacgtttcttcgatacgttgaataatcttatcagacgacatagacttactaatataatcaattgcaccgatacgacggcgatacgttaatggagcgtacttatcgtacgccgttacgaagatgatctgggcattttcgtcattcttcttgatgaattcagctaaatctacgccattcttagctttagactctcgacttaattcaatatctaagaagtagataccattcttaatatcatttgtgactatgtatcctaccgcttgagcaaaatcgttagcaacaaacgtaacagattcatttaattcagcgtaaccttcattatcatctattaagtcttgaatagatgcattgatattcttagcaatctgattagctaaatctttatcgtcatcgcatacaatgattgggaacttactcatcctcttcaccatcttccgtatcaattgtcatataaaagtcgaaccagccgtcttgaattgtataagaaatagacatatcaggatatttactctcaatttccttaatattagctaatccaagccctttatggtctttcttagtagtaaagccacgttgttgaatttgactagttgagatatttttattttggattttatttctgatttcgaactcaaattcatctgggtcatcagaatagaccattatttggacttcagcacttcgaatatcatgcttttcggcaatcaatgctttactttcctcaattgcattatcgaaagtaatgccaataatacgtactagatcgagttcatctacatggtctggtaaattacggatattatttcgacattcaaaattatatggtatatccaaattatacaattctgttatctttggaataataatgctcttaattgatttaacgtaaatgtgatttaggtctttatatttaagtaaggctttagaatttaggttagtttcagtatatttatctagtttctgaattacttcttgaacgttaccttcttgcgcacttacctttaaagaattaagaatatttttgtaatcatgtctgaaggcgcgaagatcatcttcacttttttcaagataagaagcatattcttcaagctgatgctgctgttgctttaatttttcttgatcctttttatttaaaagtttttcttgtaccatcgtcatttcatgatatataaatatagcaaaaatagtttggataagaatatagagagaaaagaacaaagttaatggtgtaaaagatttgctttgaatatatatgatagagatgctcaccgtagaaacataggtataagctaatatgcctacgaaaattttattattttggtttgctagataattatatatttttccattacctagttttattgcaactatcatcattagtattagtaagaaacgtagtgataattggcctatcaaagtaaatgacataacctgagtgatcatatcagacacaatatcaactaataaatctaatgtgcatactaatattattgaaccaaatagtatttctaatgtattattttttctcaaatataatacaaaaagcaaagtttcgaaactgtcaaatcttttgtgtaaatagttctttctcgtaaattgattttttaattatttatttaatcaaagtaggattctaaggtgtcctgaacctgaccaaagcctttatgaattcgattgaaataacggtcattgtagctcattgcctgaataccaataaaagcatcaagcgactgttcagttggaaactctgccttaggcttagctttgcgcttgatcacattgttaaatgattcaatcatgttagtcgaataaattgaagctctgatctgcttgggatagttataaaagaccagcagatctggttctatgtctttcaagcttctgataacatggctgtaaaccttgccccatttggtatagaagtcatgcaggacagctgtggcttcttctttgtttgtctgttgatgcacctgtttgaattcgttcatgatcttttcacgatcgtcgacgcgtactttagcgcagatattgcgcatgacatgaaccaaacagcgttgaaaatgagctttaggataagtcctggccaaggctgttttcatgccaacaacaccatcagaaagaaagagttcaacttgcttcaagcctctggacttcatgttttgaagcatctctgtccagacttcaatgttctcactaggagcaatgcagtagtcaatgacttccttatgtccattaggtttaatgccaatggcaatatagactgcttcacgctcaaacgtttctcggcgcaaaggaaggtatgtcgcatccaaatagacgcagaaaaacttgtcgcttagcttgcgtttgtggtaagcctcaacctttggaatcatctgcttggaaatatttgatacctgagctggactgtaatggctgccatacatcttttcaattagatcggctatttccctggtggtcacgcccttggagtaaagcttgataatcatgctttccaagatatccgagtgctgcttgtagtcaggcagcgtgtgctgatgaaattgaccgttgcgatcccgaggcacttgcacttcaattgggccaaattgcgtatcaactttgcggaaataagcaccatttctagagttgccagtattccagccatttctggcatagggatcatagcccagaaaggcagtcaattcagcttctagcaagttattaacagcctgttgtagttctttgcgcaataaatcatttattttgtctggattgaatagagcttgagcaaaatctttggtaaaatcattcatgaaggagttcttctttctgtatgtgttttttttgttcaaaccaatcatacgagaaaggaactcctttttctaatgtttaaagaaataaatttaaggaatcattcatccttacacaaactattttacagtctcaaagtttcaagtatatttgtgaagattacgccaatattacctatagacaataacaaccctaaaaaaatattagcaatacacaaaaatagaatctgtctctttttagatcttactcttgatatttaaaaaaaacaccatacatctgctaaactagaaaaaacattaagaaaaagaaataagactatcttttccatatattattccaaagttttttactcaagaaattaaaaccaacatgtgccgtgcttccaccaacaaccttagtcaattcttcttccttcaaaacagtctttttaacattttgcttcttcatgatatttcatcctttcatgattttatactcaacttgtttacacctttaatatatcatgtacttttaagtaaattaaaaaagataccaattcagtcatactttcgtaccgatccggtttcatatttcttcaaacgtaaacaactgacaattaattttcttagctaattcctgacagctatccgtaaagccagatttggaaaatagataataatgcttaagtggatacttgaagatttcactatttgtaatcaatttttctaacacactacgagagatcggttcattcttccatttacattcgccgaaatatccatcacgttcatcgtcagagaatcctacaatatctaactcaacttgttgatgtgttctcttatcggttccccaccaattgcccaagtggataaacggattaggaacaattttttcattcatatcctgagaccacatgaagtcttgactgtatttttcaaactcaggtcccatgaaatcagatagacccttttgtacttttacccaagcaagatcagttaagccacgctcaattagatcggtttgcttgccaacaaaggtataccagaagcggaacatcccgtcacagatacgataaacgatatttttgcttttactcttcttttgctcagtaaccggtaactttttctcaacaatacctaaatctatcaaattattcaggtacgtggttagcggaccagtttgtaagtgggcggattgcgcaattttactatgcttagaagcacctgaagctatcgcattgataatcgaattatagttagttggatcgcgtaattcctgttgtaacaagttattaggctcatcaaataagcgacctgatttactcaaaaagtttttcttaatattatccgcaactgacatgctgtctgacatataactcaaatattggggtacaccgccacaaaccgtattgatgataaaagcgtcctctttactgagttttggtaacatttcatgtgcttctgataatttaaatggttcaagctttaaggctaaagtgcgacgaccatatagtggactttggtagcctaagacttgtcgttccataaatgacatcgatgaaccacataaaatcaaaaataggttagtttctttgaattcatgatcaatgtaggattgcaacattgaactaattgtagggtaagccttagccaaataaggaaattcgtcaataactaaaattacacgttgtttttgagctaggtgtgtaatttctttaaagcattcctcaaaatttgcaaatttttcttttccaccctgatctgtatttttaaaaatactaattgcatcagaaaaacgttttagattatcttccgcattttcttcaagtgctacataataaattgactttttatcttttaaaaactcattgatcagtgaagtctttccaattcttcttcgaccatagatcactgtaaattgaaaatcattttcttgatacgcctgattcaattgctctaattcttgatgtctacctacaaacatagcgcactccttttcactacatcgtaatatactacattatattatactataacacgatatagtataacgtaatgtacgtgtattctatttttgtaataaaaatggccgttacttagagaaatagcgaagatcattaaattttaacatgctataataacaatagaacaagaataaaaagttttagcgtgcgcgttgaggtagctcctcaacttagtcattaacgtgtggctctgctttggcaaagcttttttgttatgttaataccctacaaaaaagaccgtgcatccctgcacggtcttttcatcttatcacatctattttctaacgtattcgccgttcttgtacttaaattcaatcttcttgttaggcaattgaaccgtaattctgcgatatacaggaccgaagccgtgcttttcaagcttaactttcacgctaccgtccttgtttaccttaaccttgtacaagttgtattcgcccttttggtacttaaagtcagttccgttatcttgatagtgaacgtacttaccctttttaccaaatagtctaaaggtcatactctcgtctggttcaccagagatgtggctaacttctttaccccatggcaagatagtgttcttcttgataaacagtggcaacttgccaattggtgcatcaaccaaaatcgtggtctttccagcatgttcaacaccattccagaaatcaatccattttccttttggcaaatatacggcacgcttggtttgaccttcttgaacaactggggctgccaaaatgtcctcgcctaccatatattcatcattcaagttatacacctgtggatcattttcataattaaggacaagtggacgcataattggcaaacctgtcttagtttcacgatagaattcatcgtaaagatatggaatgaaacggtaacgcagcttcaagtacttacggtaaattgacaaggttggttcgccaaatatccatggttcttgtgagcgagttcctagagccgcatggtttctgtacaatggactaaacaatgcgccttcgatccaacgagtcaacaattcaggtgttgtgtcagcaccaaagccaccgatatcagtaccggcaaagctgaatccactcatacctaagttacataattgtggaatcatcatttggacatgtgtccataaactttggttgtcaccagtccaaactgtggaaaacttttgcgttcctgcatatgctgcacgcgtaatgacaaatgggcgttttccactgaatttcttcaaaccttcataagttgccttagccatgttatgaccatagacattgtgcatcttcttatgagttgaagcttcttcttcattatggaagacgatattttgtggaatttcacccttgaaggatgcaggttcattcatatcgtcccagatacctgaaacaccaaggtcaactaagtacttgcagttcttagcccaccacttacgtacttctttgcggccaaagtctgggaagactgaatcgccaggccaaacttggtttacataaacagtgccatctggagcctttacgaagtagcccttttcgataccttccttgtagatcttatagtcatcatctttcttaacgccagggtcaataatcgtgattattctgaagcccaatttacgcatcttagctacgaatttctctggtgactcatagttatcttttctccaggtaaatactctgtagccgcgcatataatcgatatccaggtgtaaaacgtcacatggtaagtcatacttacgcaagttttcagcaatcttctcaacttgcttttgactgacactgtagccccaacgtgattgttgatagcccaaagtccacttttgtggcattggtacacgaccagttaaataagtgtagttagtaataacttccttgagtgagtcaccaccgatgatgtagtagtcaatattgccatcaaccgctgagtagtagtaatagtcattactttccttacctaagtcgatgtggttgcgataagtattgtcaaaaaagataccgtaaggatgaccattttttaatcctaataaaattggaatcgacttatacaaacgggtaaagctctctacttgcggatcaggattgtcagtattccaattatcataagcatagtggcgtttgttcaaatagccggttttatcacccaagccataaaattcttcgtcatctgctagtgacttgaccacttcataataatcggcgtcatgctttcccagtaatttatccacatcatggccttcagattcagccagcttcaaatgttcctcatccatctgtcggtcaattggggttcttttcccccgataatctacgaccaatggattgccttgttcatcaaagacgtcaattttttcatcatcataagcttttactatcaacttagccgtagctatttcaatatgatcgcctttatttttaactgtaaaatcagttttaatttctttatcgccttcgatagcataagaattgctagcattacctcgatcttgaaagaatcgcataatttccggtgttaacacggtcaaaatcattggtccattctcatagtttaaggtaattttttgtccatctttagtaaaatcagtaagttgattaatcataatttacctctaaaaaatcaaaagttatgtattcgctttcaattttaacacaataagctaatcaattgggtcataccagaaaaaacaccttcagaaatttttgtatttaaatacaaaaaaactgccttacggcagttttatttaatttattccattggaaaaatcttatctggattcaaaacataatttggatcaaaaacatgcttgatctttctcaaaagttcagtgtaatcatgaccatagaaatcctcaaaccaatctttgcaggcataaccaataccatgctcgccagacatatttccatccaaagctttagctgtcttataaagttcggtaatcacataatgactcttttgctcaaactcttcgtcactcattgcatctgagcaaagataaatatgtaaattaccatcgccggcatgaccaaagttaggaattcgcataccaacctcttgttccaattcatcaactctatgcaaaacatcaggaatatgattaattggcacacaaatatcaacttcatccatctttggcgtagacttttgaatagccaaaagcaatgcttcccgacaagtccaaatcttctttgcttcctctgaattagcatctaaaattaccgcatcagctgctttaaacttcttcgttgctgcaagggcaagctttaattccgcatccaattcctctttagttaaagaatcaagccctagaataatgaagccatcgccatttgcaatcgggaatttttcatcgtaatacttttcccagagactaatgacttttctacccataaattcaacggttgttggcactacaccagaagccaaaattgctggtactgatttaattgctttatccaaattaggaaacggaataattgcattgatcgattgtttaggacgtggatataaacgcatggtaacttcagttactacacctaaagtcccttctgagccaatgatcaggtcttttaacgaataacctgatgaggacttaactgccttagcgccaaattggtaaagtttaccatcagttaaaacaaccttcaattcgcggatatgttctcgagtaacgccatatttaattgctttcaacccaccggcgttagtatccacattaccaccaattgtagcccaatgcattgctggagctggcatataagtaaatggtttattggctaaatattcttcaatatctttcaaccgaatacctgcttgcacagtcatcgttagactttctggctcgtattccaaaaccttattcattttcaccatatccagtgaaatgccaccttcaacggttaaattgccacccattagaccagtcgaattaccacgcggaacgataggaatatgatgatcgcttgcatatttaacaacgttttcgacttcttcattagtttcaggttgaattaccaagtaaggcattgctctaaccgtcttaaattggtcatgatcccaatgaacagttggcttagtaatgaatcgctctggatctgagataaatttactcaaattatctatatctgttgcagttaattttttaaagtccatctttgacacttctttccaaattgaaacatcctatattaactaatgtatccgcttttgtaagcggtgtcaaaaacaagaactgaagatttttttatctaaaaaagcaaatttccatactacctcactttaaaatgcgatagtatcgactttcatttaaataactattacacaaaatatgaaaataaaaaaactgccttacgacagtttctagttaaataaatccgacatcttagttggaatattattgtttttcacaaaatactttttaaaagtaggtaaatctgcattttcttttttcacatacatatcatgtaaagcccaaaatgcagtgattaacaaattaacgcccaagacaattaacataccgattaaaatatatactaagtaaagcattgatctatcccccgctatatcgtcacttgacccagagtcgcatcttcaatgaagtatctgacgaaagcttgattgaagctcatgccctggccgttgtaaacatgccactcttcgcgtttggcacctacagttctaatgattgaaattactgtgcaaattaccaaatatgcgattagcacgttaaaaattattttcattaccagcatgtctacacttcctctctgtactactcaactaatacactaatatttattagtcaatttgtcaacatcttttagtatttacttttttctccccaggtataaaaagccatagatagctggtccgatcactaccgccccagctatagaaactataatcactgcaataaagcgaggcatagcaaaaaattccgagctaaatttcatacaggcccaggccccaaagaaaaaaatcgcccagccaattaaaattgaaattagcatatttaaacctgaaaatttaggtttagagtttttattgttcatcaagttttctctttcataaaaatattgtgccacaaattgaaggtcaataaacaaaagtgacagattcggtcgttttttagacttatttggtaaaaaataagggagattaagtaaaatatggcgcttaatctcccttttgaatcaataattatttgcccataagacctgaaaaagccattcctaaggcagcaccaccacatgcacctgctttagctgatacgggacgagcataactagtaattgcataatgaaacttcatcacatcatgtgacaatttaccctgccagcttaatggatcaagaccaactcgaattaagttgcagacataattagctgattcaccattttctaactcatgctttgcatcaagtaggatttttctttcttctggcttagtatcttcatttactagtaggtcagtaatattacttaatagccattgttttaaatcatctttattttcttgatacatttttatccctctttttcgactttttcattaatatcaggatgcatccctacaaccattttagaatctttcatgttcttcatcgattcatttattttaataaaaaactctgcaagtagcagagctttttacctcattgcagagttacttatacatatacttagcacatgcttttttagaatccataccattacgaatcttcaaagctaattcaatcgatacatccgcaataattgattgtgggtcaatcacattgtaaggatgatctggtgccttttcctgagctaacgacaattctgtacatcccagcaagattacgttgcagccataatcatcatgcattttttgcaagatctggtggtacaatttaccatcaaccattcccttttctttaatatcggaataaatgagcttattaaccatcggttgaatttccggaccacctaattctgcctcacggtgaaccgcatgaatttcatccacatacaaatgatcatagattgacccttcagtcgcaatcaagccaattttcttttcttgtgggtatttttcaataaattgatgcactgctattctcatcatgtgtaaaaatggaatatcagtcaatgcagccaaatcatcataaaaatagtgagcggtattgcatggcatcacatagaagtctggtcccaatttggcttggcccagaacatcgtcacgtaaatcatagaaaaagtttggtttagtatgatctttaatataagccgttctatcaggaatttgtgcatcattaaccaaaatataatttaaataatcttggtccttagctatttttacacggtgattaattaaacgaacgtagctttctgtggcaatagttcccatgccgccaataatactaaagaagtgtttcactattttcacttactttctaaagtgttcttcttgaccttccaactcattaattacctgctgtgcaaccacaatatcagatggatatggggtatttactccgcgaattttttggaaagcgtcagcccccttaccacagattagcacaacatcatctggcgtagccatggcaatcgcatcatgaatggccttcttacgatctaactcaatagtaacgtcgcacttagagtgatctattcctgaatcaatttcttcggcaatactctttggatcttcaaagcctggatcgtctgtagttaaaaatgctttatctgcgtatgcagtcaaactttcactaaaaccgggacgacgtgacacgcctttatcaccaggagctccaacaacaacaataattttaggatcgttgaattcgttacgcataaatctcattaaagccatcattgaggccttattatgagcgtagtcaactacaaccatgccgtgcttctttgttctctcggtttgcatccggcctggaatagtaacatcgcgaatacccttcgcacattgatcatggttaagtccagccaagcctgctccaataattgcggcagtaccatttgactcgttgaaatcacccagcatctttaaagtataatcaccattaattggtaatttacgtgccttatcactagcacaaactaaattgaaccgagtttctttcatatctaattgttcagaagagaatctgaaatcaattggctgcttcaagtctggattttcaaaattatcgcgggcaaacaaataaatactatcggggttggtagtagttgttgcggcagcgtagacttcatcaaagtgtgcagtttcagcgttgataatacatttacgtgagttaacaagcaattgtaatttgcagtgcaaataatctgcaaaattagggtgttcgttaggaccaatatggtctggactaatattcaggaaaaagcctaaatcataagttaaaccgaagacacgatttttcttatatgcttgactagaaacttccattaccaagtgagtcatgccattatcaacagccgttctcatgtctcggaataagtccaaactctctggtgtggtcaagcttgacttaaagctatcttcaggcttaggaccgaccacatcattaactgaagaaatcagagctgtcttaccaccatttgcttgatcaagcatccctttcaaaaagtatgctgatgtagtctttccctttgtaccagtgaaagctacaacaaacaagtcatcttgtggaaaacggaagaaagcagctgacaaaagagccattgccttagaaacatcgcgcacaattaaagcgtgccttccttttccttctggatatggttgttcagctacataacaaatggccccattgtctttagccattgacaaataagttggtctaaagcctgctcccttgcagaagaacaatgtattagtttgaatatcgcgtgagtcataagacacatagtccattttagtagctactgtatcttgcactgcgcttgacttgagcaagtgatgctcttttaagatcaatatacaggtatttaaggaaatactcattaacttttctcctcgttgtatttaaaacatttcagtcaaaattataacacagctagtgtgttggtgacgctttcttcggatcaagtggcaaacgaataataaaactagtccacttttcgtttgattcacagcgaattgtaccatggtgtaaatcaaccacacctttggtgatagataatcccagaccagttccgcctgtcttagtatttcgcgaagtttctacccggtaaaaacgctcaaagattttatttaatgatttcttcggaattggtgccccattattttcaacgcgcaactctacttcacgtttgttgactaaattggctaccaatttaattttagttgcccctgtaccatacttgaaagcattagaaatcaaattattgtaaacgcggaccagcttttccgcatcagccttaatcgttagattctttggccgcgcttcaatctctatttcaatgccatttttttctgcttctaattcaaagccggccgctacctgctccaacattgaataaatatgcaaatcattcagatttaacttagtattggtcgactttaaagtagtatattcaaacagatcgttagccagtgctttcatttgttctgccttagtataggcaatattgacatactttttctgatcttctggcgaagtcactcctgcttttaacaaaccaagataaccaataattgatgttagcggcgttctgatatcgtgcgaaacattagtgatcaattcatccttagattgctcaattgcccgttcttcattaatcgaatttacagtactatcaaccaacgaattaatcgaatccactactcgttgcaattctggtcgtacccgaaaattaatccgatgatcaaaatgaccattagcaatatagtgaagttccaaaataatgtgacgtagctgcatttggtgatagcgtcgaatcaagcgccagtacaaaacaaccaagtcgcccactcccattaagacgatgaatacgttttgccaggaccagagatgatagccacctgcaaaagtgatcgtcttttttagaaagtagattccgttgaccaggctttcatcctgcaaaatagctaagtgaatcagaatgataattgataaatttaataaaaacagaaggacgaccgttacgaccccttctgcaaacaattcgctcttttcggcgccagttagcttgacgcgttcttttttcatcttatgcctcgaccttgtaacctacgccccaaacagtttggatgacatcctcaccatcagtggctttttgaattttatcacgaaggtgtgacacgtgtaccatgacagttttagctgaaacaattgattcttgttgccaaacacgttcaaagatttcatcagctgaaaaaacacggttagggtgactagcaagtaagtataagataccgaattctaaggcagttaattggatagtcttaccatcaatagtcttaacttcatgtgaatcacggttaattaccaatggtcctacttccaaaatatctggtttttcattcttaacttgcttttgacttcttctcaaaagtgaacgtacacgagccattacttcaagtggattgaatggcttagaaacatagtcatcagcaccagtgattaagccttgaatcttgtccatatcaccggttttagcagaaacaataataattggaatatcggagtcttttctaacttccttaattacatcgattcctgacatatttggcatcatcacatccaaaatcatcaaaacgatatctggcgtagtggtcaatttagtaattgcttccttaccactatatgccgcaacaggttcatatccttcatttttaaggtagatacttaatagttctacgatttctttgtcatcatcaacaactaaaattttcacgaggaatgttcccccttcttgtttattattctctgtttttctatctacagtttagcagatatcatatagaatattttacacattttagaaaaatatactgctttcattatcctttttaaacaaaagctaaaaaaatacacgtttctccatcatgaaaaacgtgtattcattctatttactttaccttatcatcatgcaatttagtttcgacataaacgcagacgataaatagcaaagcaaaacagcagatcttaggtgctgttgcataatcaagcatgctagcaaaaccgaataagataccatctggaacaacccaccaggagccgatcgaagaattaaaggtatcactaactgtcgcaaagaatgcaattaaaatcgttaaaacaagtaaaactgaagttaagatcattcccggccgaccaaaatctttaaaaccatgatcccagtagactatcactccaagcagtaccaataagattgataccagccatagactaccctttttcataataaaggccttctttctgcccttatcctaacacgattaagtagcagctgccttgtttaacgcttattgaatttccttcttgccagtgtagagttcatagtagtaacccttttgcttgattaattcatcatggttaccatgttcaataatatgaccatgatcaagtaccaagattaaatctgagttaacaatcgttgacagacggtgagcaataacaaaactagttctaccagtaagcaagttgtccatcccggcttgaaccattttttcagttcgagtatcaatacttgaggtagcttcatcaagaatcattactggctcatcagcaatcattgcccgcgcaattgacaacagctgtatttgcccttgtgaaaggtcgccgccatcaccatcaatcacagtttcataaccgtgatcaaggtcatggataaattcatctgcgtgtgataacttggctgcttgataaacatcgtcatcactggcatctggattaccaaagcggatattgtccataattgtgccagtaaagagatgggtttcctgtaaaacaattgaaagtgattttctcaaatcatcttttttaatgtttttaattggaataccgtcataagtaatcgttcctgaatcaatatcgtagaaacggttaagcatgttagagatggttgtcttacctgcaccggtttcaccaactaaagctaccttcattcccggtttggcattaatggaaatgtcatgcaagatttgatgatctggtacgtagctaaagttaacatgatcaaaaataatatgaccacgaacttgaaccttcttggttgagccatctttttgtggtacattccagtaccacttactgccgacttcatcgtttttcttagaaagagtaactgtaccttggtcagcttctgacttttgatcttccaagttgaaaattctttctgcaccagctaaagccattacaatagagtttaattgttgcgaaatttgggcaattggcatactgaattgcttagataactgtaagaatgaaccaatggcaccaagtgaaagcggagcccaactattaattgcagcagcaccaccaacaaaggcgatcaaaacgtaaagcaagttacccatgttacccataattgggaataaaattgtagcgtaagtgttagccttacctgaggcttgacgcaactcatcattatatttgtcaaagccttccttagattgtggctcatggctgaagaccttgatgaccttcaaaccattaagcatttcttcattataaccattgatttggcccagcttcttttgttggacttggaagaagtgacttgatctaaccgttaagtagcgcacaattccaaatgataaagcaaaaataatgaaggagaacacagtcaattgccaactaagtgaaaacatagcaactactacaaataataaactcaaagctgagttagtaaattgtggaattgactgtgaaatcatctgcatcaaggtatcaatatcgttagtataacgcgacatgatatcaccaaattcattttggtcaaagtatgaaattggcaagctttccatgtgaacaaacatttcgttacgtacacgatattgcactttttgagctaaaacacccatcagcatgttaaaaaggtaattagacaaaaaaccaatcgcatagatcccaaacattaccgcaattgcagtagctagagggccatagttaggaactttttctttagttaaaggcacaatataattattgatcaaacgttcaatgaataacgagccaataacgttgctggcagctgctagcacaatagtgatcatggaaacgatgagcatccatggacttgtactattaaccagtttcaataggcgcaataagattttggttctgctaccctttgtttgatttttacttttttccattgcttgatccaaattgctcacctactttccttgttcttcctggaatttagcgattgaactataaagttcgttagtcttcatcaattcatcgtgggttccgatagcttgaatttgaccatgatccatgacgataatccgatcagcatccttaattgaaacaattctttgtgaaataatgattttagtagtttctggcatatctttagccaaagacgttctaatttgtcgctcagtactggtatcaacagctgaagtggagtcatctaagatcaagatcttcggattcttaagcaaggctctggcaatagtaattctttgcttttgcccaccagaaacgttgttaccaccttgttccaccattgtgtcataaccatctggcatttcacgaataaagccatcagcatgggcgattttagcagcggcaattacttgttcatcggttgcattttcgttaccccacttgaggttatccttaatcgttcctgtgaacagcacattcttttgtaaaaccatcgcaacgttatcacgcaaggtcttcaagtcatatgacttaacgttgtgtcctgcaacccgaacggcaccagaagtaacatcataaagacgcggaatcattgaaaccaaggttgacttcgatgaacctgtttcaccaataatcccgattgtttcacctggcctaatgtgcaaattgatatcttttaaagcatcagccttgtccgcaggttcgtacttaaagctaacgtgatcaaagataatttcaccattggtcaaacgtttcaatggcttcttaggatcttcaattgttggttcttccgtaatcactgaccactggcacctgagataaccaattgcgtagtaatcatagctaaaatgtttaaactaaacaaaactgagtttgaataagtaaacattgaaattaattgaccagtttgtaaactaccgccaaccacttcttttgcaccgaaccagcagattgacagcgttgaaatattcaaaacagctgcaactactaatgcgttcaaagacataatcttttgtgcagtcgcaaacaacttgtaaataaagcctgatgacttcttgaattctttaatctgcggttgttcttggacataggtcttaacttcacgaataccacgtacgttttcacgcacaacctggttcattcggtcataccctctaaaaatcttaggaaagtatggataagctgttttaataatcaaacccaaagcaattgcaaaaaccggtcctaaaactgcaaagattaatgataaacgcggactaataataattgacataataattaaaacgatgaacatcattggtgctctaacagcaattctgatgatcatttgatatgccatttgcacgttgttaacgtcagtagtcaaacgtgtaactaaactggcacttgaaaagtgatcaatattttcaaaagaatagtcctgcatatggtagaacatgtcttggcgcaagtttgcggcaaaaccagcagctgcatgagctgagacataactcgcactagcgcctaaaattagcgaaataacggttaacactaatagcaatagccccattttactaatataggacatatcccccttcataattccgttatcaatcaaaattccgaccaaatatggaatcagcatttcaatgataacttcaccaataacaaacattggtgagagcaaagacaattttttatattgcctaattgatttgctcaatgttttgatcatagagacccacccttctattcttttattcaatctcgcaaataaaaagataaatggatcatctccatttatcttttttatctatattaagtttaagtatgtgcttatttttacggaaattcaattaacatgcttgcaaaacaggtaaattatttatgttgttgtggccttggtgcaaatgcggaaccaacaatattgtagtgctttctgaataaataacgtacaccataggcagccgccgcgataacgatgtcagctactgctggtaaaactgggttgattacgcgcaatgctgggatttgcaaaatccacatccagacaaacaaaacaactgctatagccaacattcttaagatcagcttaaccaatgaaggacgtttaccttgctgaggcattagccaatcattgtatttaaccatgaagatccccattaaaatacctacactggcaattgtcagaatccccatttgtgaattatacggttggttcttagtttggaataatgcaaggataccacataaaccaacaaaaattgctaaataaagcaatgcgccatcaaccatcaactgccaagttggtgtagccactggctttttcttaggatgaagcatttgttcagccttaattgctggtgaagccaggtaaagcccattggctggttgcccatgacgttgggcaataataatttcactgagcaagccattagtcatcgcaactgcatcagcacgtgacattgaaccttgtttttgcagttctttttctagacgaaaaacatagtcactgttcttgttactcaacttttcacgcaaagcttttggatcttcctgcttaattttttcatcctgagtatcaagctcagcttgcttctttaatttagcttgtttttcagtgttaatttttgtttgatcttgttctctctttgtctcttcagccattcttactcctagacgttaaatctaaattcaataatgtcaccgtcttgaacttcgtaatctttaccttcaagacgcagcttaccagcttctttaaccttttgcatagtttcaagcttgtctaaatcatcaaatgaaacaacttcagctcgaataaaaccacgctcaaagtctgagtgaataacaccagcaacttgtggagctttcatccctttgtggaaagtccaggcacgggtttcaggaccaccggcagtaaagaaagttctaaggcctaagatatgatatgcagcacgaatcaaacgatccaagcctgattcttctacgccttccatctcaaggaattctttcttttcatcatcagccataccagcgatttcttcttcagttgcagcagaaatacctaagcattctgcaccttcgctttcggcatgcttcttaacaatttggtaatacttgtcgctttctggatcagccattgagtcttcagcaatgttagcaacgtagataactggcttggaagttaacaagaacaagcccttaacaatcttttgttcatcttcgttgaagtcgattgaacgagcagcattaccttcttcaagtactggctgcaatttattcaaaacagccatttcagccttggcttccttatcgccttgttgagcaaccttctttaccttattgattctgcggttaacagcatcgaggtccgcaatagcaagttccaagttaatagtattaatatcttcttctggatcaaccttaccagtaactgaggtaatattgtcatcatcaaaggcacgaacaacgtgaacgatggcatcagtttgacggatgttttcaaggaacttgttaccaagaccttcaccttttgaagcacccttaaccaatccagcaatatcggtaaattcaaaagttgtgtgcacaatcttcttagcaggaatcaattcttgaattcttgccaaacgcttgtcaggaacttcaaccattccgacatttggttcaatggtggcaaatggatagttagccatttcggcaccagccttagtaatcgcattaaacaaagttgacttaccaacgtttggtaaaccaacaataccagcagttaatgacatttgttgtcctctttttctaaaatcaattttttatttttacttacttgtctattttatccaaaatttggccgagcgatacgatcttttggcacatattgctctttttttgcattaaccggatcattcgccttagttaatagcttttttagcttccggttaaactcgctgcgcggcatcatgactatgtgcccacaacccatacattttaatttgatatcagcacccatgcgcaaaatttcccaatcattagtctgacaagcatgaggctttttcatttgaactgtatcagccaaattataaacaatttctttagccatctaaatcaacacctaacaaatcaagaatccggttcaattcttcagtcgaagcaaaatcaatcgataaatgacccttacctttttgtgtttctgaaatattgacgctagagccaaacttattagccaattggctttcgctagcccggataaaggccgatttcttgacggtctttttgctgcgaggttttttagcgttcaattcactgactaccgcttcaaccttacgcaccggcatcccttccttgactactcgcttagccagcgcatcaatcttttccttatctttcaaacttaaaagcgttctagcttgtcccatcgacagttcaccatgttggagtaaacgcttagtcttgctaggtaaagtgagcaaacgcaaataattagcaatatatggtcgcgacttacccatccgcttcgaaacttcttcttgcgttaagccaagattcttctgcagcatttcataagcttgcgcctcttcaagtggagttaaatcttcacgctgcaagttttctagaactgccacttccatcatttggctttcgttaaacttgcgaataattgctggaatagtcatcttcttagccaatttagaagcacggaaacgacgctcaccagcaatgatctcatatccattaactgattcgcgcacgataattggctggaaaacaccattttccttaatagaatccgacagttcttttaagctcttatcatcaaatctttttctaggctgataaggattcggccgaatatcgcccaaatcgagttcttggacttcttctgcctcttgaacttgaggctcatcctcaaataaggcttcaagaccacgacctaggccgcccttttttcttggctctttacttcttgagtctcttgtcatgagcttttaacacctcttttgctaaatcatcatataccttggcaccacgagattttggtgcatattctgtaattggctgaccataacttggggcctcagctaatttagtaattcgaggaatgatggtcttataaactttcttgctaaagtaggactgcacttctttaaccacttcagcacccaagttagttctggcatcaagcattgttaacaaaacgccttctacgccaagatctttattaaaatgcttttggactaaacgaattgtgttcaaaagttggctaagtccttccatagcataatattcactctgaactggaatcaaaattgaatcagatgcagtaaaagcattaattgaaagttgccctaatgatggcggacagtcaataaaaacaaaatcgtattgatcgctaattgcatctaaagctgactttaagcgtgtctcccgagccatcattgaaattaattccgtttcagcaccggacaagttgattgtggctggaaccatatctagctttggcgttgaagtatggtgaatagtatcttgaataggaatttcgtcaatcaaaacattgtaaatgtcctggtcaatctctgatttttcaattcctaaaccagaggtagcgttaccttgtggatcaatatccacaattaaaacgcgataaccacggtcggcaattgaggctgctaaattaatggtcgtagtggttttacctacgccacctttttggtttgcaaccgaaattacatttaccatattgttcatccttccctattacttccttttcaattcaattgtgatcttataatcatccggatctttattttctgttactttgactttaattcctgagtcttcggctaacttaaccgccttcttaatggtgttaatttgtacctttaagtctttaggaactcggctaacgacccgcttagcttcttttttagccttaggcttagggttaaagtaaacatccacatcttgcacaatctcttcagtttgtttaacgtttaagccttttgcttcaatttctgtcaaaacgcgatcttgatctgcattacttaagccgatcattgcacgaccatgacgagcggtaattttgccagcaatcaaagcttgctgcacattatcatccagcttcaataagcgcaatttgttagccacataagattgagacttacccatatttttagccaaagcagtttgagtcaaatcatttaattccattaaattagtataagcttttgcctcatcaattggatttaagtcttcacgctgtaagttctcaatcaaggctaatgaagcagcttgatcatcactcatatttttgacgatcgcaggaatagtctgccagcccaagcttttagctgcacgataacgtctttcacctgcaataatctcatattgctcgtcatcgccatcttcacgaactacgataggttggagcaagccatccttatcaagtgtttcagctaattctttaattgaatcatcagaaaattcacgccgtggttgatagcggttaggaaaaatcttgctcaattcaagatcttgaacctgtttattcttaggaatttcatcatcatgatgcataaaagaaaataatgacataatatacccctttctgtttaatgaatcggtttgcgccgcggggtgcctgcttgacgtggatactttttaggtgttgctttgactttttgaactaagattagagttcgttcttcttcgctctcaggtagagtcaattcttcttccttaatcagcttaccgcccagcaattcaagagctttttgaccatcatccaattcatcttcggcttttggtcccttgagggcaataaagtaaccatcttttttcaccaaaggcaagcaatattcactcaaaacactcatccgcgcaaccgcacgagcagtaacgagatcgaacttttctcgataaagcttattttgaccaacgtcttcagcgcggccatgaactaattcgacgtctttcaagtctaacttagtaattaagttctttaaaaaagtcaatcgttttgccaaagaatcaacaatggtaatcttcaattctggctgcaaaatcttgagcggaattgatggaaaaccagcaccagcaccaacatcacaaagagtggcaccatctttaaaaacatcgccaaaagtaaacagcggcgtaatactgtcataaaagtgcttaaggtaaacctcatcttcttcggtaattcgtgtcaaattgacatgctcattaacttcgatcaaataattaaaatatattttaaattgttcaatttgttggtcagttaatttaaaattgtgttttgatagttctaaaataaatttttcaggattcatttttcacccgtgaaaccgtgtttcacacctctaaatttaacgcaaaatgcattgattagtaaagatatttcatcttatcaattatgaagtatttttactcaatcgtcaaagttttgccgcccgcaaaatagggtataataaggcgcaaaggagttaaaaatatgattgttactttaattgttttagcttacttagcatataaaacatatttaggctataaaacaggctttacacgctatatcatcggtttaatctgttccgccattgtctttatggttgccattttcatgcaaaatccatttggtaattggctatacacacaatacactggagaaatgattaagactaactccactaacaacgtggaattaatgattgcacgctttgtcgctttctttattgttttcttcgtgggcaaaatgatcatgaagattgtcaaaagctggattcctaacaaaaatccacatgcgactaacttaggcagtattctcgacaatgtcttgggtgctctagcctccctaattgctagttattttgttgtttatgtagttttgtccatgttcaatgcactacaaaatccatggtttatgcagcaaacaattgattctagctttttgaggtttatcatttacaacacaccggggctttcaaacggtgtcttcaataatatctttaatattggcaaaactgtgggataaaatatatcaaaaaagatctgcttgtatcatactgagcagatctttattgatatgttttaactaaattaatactacatttatgaaccaacattcgatatacttattagcgcaggaagttttatgagcggcggctggttctcccccccggaggtgaggcctatgggctacattgatgaaagggttccagccatgtcggtttacgagagtatctccttgatgcttttgttcggtacatttttgttggctttgctgacatatattgaccaccaccaaaaataaaaaacgccgctcaaacatactttggccagttattgagtagcgtttaacgtaaaatttaacatttgaagccgccgctcttaaagcgggctgcttggagtccctaggactcctttttctttagtcattatagcatatttcactaatcaccgaaattatcatattcaatatgttcatcattataaacaaagattgcaccaattcgatcagggttatcatgccaaccctttagtggcttgccagcaaagaataatcgtttgcattcaatttctgcttcaaccgatgttttggtaaaagtagtcacaccagctaaatcagtctttacaggatacccggttctaggatcaatcaaatgatgatactttttaccgttaactactaagtagcgctcatatgtcccactagtaacggctgagcattcaggcaccataactgacgtaatattgtcgcctcgcggctgtttaggatcttgcacaccaattgaccactggccactaattcttttaggcgaatcaccaactaacaagatattaccgcccagattaataattcctgcttcaacgccatatgcacgccacaagtcacgaattcggtcggcaatccaacccttagcaattccacctaggtccagctccatgcccttcattttaagaaaaacagattggtcactgtcatttaaaaccaccttaaatgggtcagttaacagcattctatctttaatttcttcatctttaggaacatgtgcgcctttaaaaccgatatgccaaagcttaacaactggtccaatcagagcattaaagccaaaattctcacggctcttttctactgccaatttaaccaaaccatacacagcactagagacctgtaccggatgttctccagcagcatgattgatatccattacttcagattcatctcgattaacggtaaaaatatcttcgtaatgatcaattaaatcaaatgatttttgcaatagatcacgattttgagtaccaaaaatctgcaatgtaattgaagttcctaaagcatgatgatcaccaaccacctgctctaatgctaaatctttaatcataattatttctcttccaaatataaatcacgcaacgcctcacgtagttctgtcgttacgccaattttttcttgtaaaaagttatcgaaactaccaaaattctgctcaatagcgattaatgaagtatccaaaaaagcatcagaaactgaacctaaaattcgcatattagcgcgaaaacaaagattctcgccctcttcttgcatttttttatctcttttggcccgatagttattaagcatataatttgagtacaaatagtcctgtctaattgtttccatatctacgccaagcagatataacaagactacagttaccaatccagttctgtcttttccttctgaacaatgataaagtacagcacctttttcagtattggccaacagctctaaaattttatgcaagctatgttgagcgtgttctttcaatacatgtgacttgtaacgctcacacatcattctaaagccagcatactgatcttgacgataagttgcgaatacttgggttaagtctttcttaccgcctttggtgttgtcatcaacagaaattggaatacagaaatgctctacgccagggattttgctgtctggacaatggtcacattcagttggtgaacgcaaatcaataatcttagtcaagccataattgagcaaaaactcttgatcatgtctcgttatgttgctaatcttgcccgttcttaataaccgatgcatcttgaccttacgtccctgatagccaacatatccgcctaaatcacgcggattacaaactttttctaatggcaaaatatttggtttcattaatttcatctctttattaagtattttgataaaaaagccggatagtgtccctatccggtaattttactatcacgtggtaagtcacgcaaaattatttgttagcttgttcaacaaatttaataaagttagccatcatagcatctagttgcttaatataatcttcattggtcaaatcgccagtttctttatcaaaattgcttgcagcaccgccaattaagatttcattgcctggcaaaacattggcactcatgtctggtgaaagcaagatttcacgagcatcttcttgcgcacgactagatccttgaataccgtatgaagtaccaacaactgcagccggcttcatcttcatcacattaggaccagcatgtgaacctaaccattcaagcgcactctttaaggcagctggaattgagtgatcatattctggtgtagccaaaattacaccatccgcattcttaacatcctcgatccacttcttagtaacatcatctggctcatcagttctacagaaaggcttaagttgatcgatttctttaacttcaatatcagcttgctcaccataacgcttagcaataaattttgctaaaaaacgattgaaagaaaatggagcgtttgtaccaacaattgctaaaattttcatttaaataagccccctacttagtaagttgtgcataccaatcatcaacttcatcaaagaagtgattcaaaaacttaagtgtacctgcatcggtcaagtcgcctttatcatcaaattgttttggtgccaaacccatcataaattcgtcaccagcaaagacatgagcactaaaaccaggtgcgcccaaaatgctcttcaagcgagtttgcgaacgagacgcaccttgaggcattggtgaagttgacacaataactactggcttatcatggaatgggtgaacagaactagaaagccattcaagtgcactctttaaggcacttgaaaccgagtgttgctgttctggtgaagcgatcaaaaccatatctgcatcagcaatttttttacctaaagctaatacgctagcaggagcatcaacgccttctttatacataggcaagcccttaacagtcgcaaagtcaaaatcatacttatcgcctaagtccttaataatgactttaagtaatttttcgttaaatgagttatcggcattggagcccgataaagctaataccttcataaaaaccacctttcaaaaatcctcttaattatcattatagactaatgtagtttaatttatgtcattttaattttaataacaacaagaaaaaacgccttcgataatgaaggcgccctctactgaatgaaaagcacaaatgattggtgaaatttctatgccaagttatccttaagcgaagcttcttcgtcggcagcaaacattgggttttcttgagtttcgctgagacgattgttaagcatagcatcgtggatttgagcattcaacacattgacgatttgagtttggctgaagcttgcaatctcattaacaatcaatgcagccatacctgtagtagaaatccagttagcaattacgatgtcatgaatcttttgatcatcataatcaacatcaggatattgttccttgaacttttcagttccaagttccatcaaagtgtcagcaatgatcttgctaccaaacttgccatcaacgaacattgctctaaacaagttaacatgagcttgagcaaaatcaatgtatgacaaatccaagtcaattaaaggttcaccaacgtacttttgttgtaaagtatgagttctcaagtcattagagattcttctcaaaacttgattgcgaagatcatccatgttgttaaattctagatacaaaggttgggttgagaagtgtcctgctttagcaatgctacgagcagtcaaaccttcaataccatccttgattgccatcttgtaggctgtatctaaaattttgtctttactaatttctttttttcttgccattttaatgcacctcaatcattgtataaaacatgtgcttttcaatacacttgttttcttttcttcatcactataatatatccaaaaaaataacaattgcaagtcttatacactaacttattaaaaaatattatcatcgcttaaatagcgatgagccgttgtctcctgtaaattgatcataatgtgaagaagccatttcaataactgcttgcttgtccaatccttgtgcagcacaaaacgaaaagaatgcagcagataaaatatagccgcgttcacgatcatctgtcaggttatctgagaacttcatattaatcgaatgatttgcataatccgttgtcaattcaatcgatttattttctggtttactactcattctattgcaacctcttttttgttctaaaacaaataaaattaaaaattcccggatttaaaattgaagtgcaacactaagtgttaaacaaaaaggccatgaagacctaaacttgaagtgacgaaaaatcaagaaaggaagatcttcatgaccaattcaaattctagcatttctaagcactatcatcaattaaccagcgtacaacgtggacaaattcaagcaatgctggattccggcataacttcccgtactgttatcgctcaagaagttggctgccataagtcgacaatcagtcgcgaaatcaaatgcggaagcgtcctgcaaagagacagcagctatttattgtatgagcactattacgctgatactgcacagatttattatgagaagcgtcgcaaaaactgctatcagcgcaatccattgaagcattatgctgtctttttgagaatgctctccagacgctttaaagctaaatttgatgccaccagcatcgatgagttcgttggtgaattcaaaaggactatgccaggctacccttgtcccagcacaccaaccgtctatcgctatattgatcagggcttgctggacataagcaatattgatctgcctatgaagctcaaaagacgcaggaacaagcgtcatcacagccatggcggtcacgctttgcacaagaagcatcttggcaattccattgaacagcgtcctaaggaggttgaagacagaaaagctccgctgcactgggaaggagatctggttaaaggcgtcagacgcaagaatcagcctgctttaatgactttgactgaaagaaccacacgctttgaagtagttatcaagattcctgactatcgggcaagcacatgccaaaggctgcttcaaaaggagattgacagacatcctgcctggtttaaatcaatcacgtttgacaatggctctgagtttgcggatatgaccaagatcaagggctgccagatttactttgctcacccatattctccatgggaaaggggcaccaatgagaactgcaatggtcttttgcgtcaattcttccctaagggcaagagcatgaaagacaagtcaaaagcttatgttcaacaggcaactgatgccattaaccacaaatatcgccgaatcctccaatatcacacagcagaggaactcttcaagcaatatatctcttcataacctaactgttgcacttaatttgacaattcaggaaaattaaaaatttaaaaatttctattataattatattacaaaatcaaaagaattagaaagcgtgtttttatcaatgaaagtttcaacttggcgctcatcatgcacctcaattttaatcgggaaaaaggcctctctttctggcagtatcatcatcggtcgtaatgaagatgctaagactgcttggcctaagcatttagcctttaatccacatcgagataatgtacagaaaaaccattttaaatccaaagacaataagtttgaaatggatttaccaacagctagctactcttattcttcaaccccagaatggacagataagtacggagtgttcgaagaagacggaattaatgaatatcatgtagcaatgagcgccaccgaaagtgcctacgcaaatgaccgagttttagctgttgacccctttgatactgacaaaggaatcttagaagaagcaatggtcaccgtagttttaccttatgttaaatccgcacgtgaaggcgttcagcgcttaggagaaattgtagaaaaatatggtgcagcagaagctgacggaattctctttggcgatcgtgatgaagcctggtacatggaaatcggttctggccatcattgggttgcacaacgaatcccagatgattcctacgctattgtcgccaatcaactagctattcaagaaattgattttgccagtgacgacttcatgtattctcaagacctgcaaaaatttgtctacgacaataaactctggcctaaaaatcagccattcatttggcgtgatatttttggcactcatgacgatagtgacttacactacaacacaccacgagtatggagcggtcaacgtctgcttactccatctgtagcacaagaacccgaaagctttaacctgccatttattcgcaagcctgatgcaccaatttctgcgcaagacgctcaacgcgttttaagcgatcactacaacaacaccgcctatgatttaaccaatcagaaaaacagaaataatgccactttcagacctatctctgtggctactactcaggaatcacacttgcttgagttaaacggtgaaaacatgattcactggctagctatgggtgtggctgcgcaaagtgtttatgtgccattctatcctcaaggcactaaggtaccaaatacctggaaaaatggaaaagaaacctactcaccaaattcagcttactgggtctttaaactggctagcgtcctggttgatcgtaattggggtaagtacggcaccgctttaagcaatacgcaaagtactactaacgaaaaattgcttcaaattagacagcaatatgatcaaaaattagcacaagaaaaggatcaagaacaacaaattaaattagtggatgaagccaatgccaaattagctaaaactgctactgatgcttataaagaattgatcgctaaactaatcaccgaacaaactggtgactcaccgttgcgtttccaaatggatcctaacttataaacaaaaatgcctcaatgaggcattttttcttactattttttcttagtcattaagccgtccatcatttcataaatatggtcggcgtatttttctagccgcggatcatgcgttactagaataacggccttgtcacgctttttcgctaaatctttaaacaattgtcctacttcttccacattttgcgtatctagcgaagcagtcggctcatcggctaacaaaatatctgggttagcatataaggccgtcgcgattgctactcgctgctgttgcccaccagataattcatttggatacttattaaccagcttttcaatccctagctgcttgagtaagccttgcaatttatcttgcgacaaattattttgcttttttactttatcaatcaaagtaaattgctctttaactgtcaaaaatggaactaaattataagcttgtaaaacaaagccaattttattcaagcgtagttctccactttgcttagcagaaaaattactaatgtctcgaccattaatcaaaatttcacctgaagttggtttttgcaaggacccggcgatcgtcaaaaatgtacttttaccggcgcctgaaggccccataattaaaaccacttcacccttattagcctgaaaattgatatctttcaaagctgcaactttagcttcgcctttaccataaactttattaacatcttttaattcaattactgccattttactcaccaattgcctttgctggatcaaccttcaaaattgatctaatcggaatcaaactaccaataatacccatgactagcatccctaacgtaccactaatcataattgctggcgtaaaagtcattggcacagctgctggtaaagttaaatcagttaaccacatcaagataatcgcaattacaacaccaatagctactaaaattatggattgactgatcgttgcaccaactaaagttttacttggaattccttgagcccgcataacggcaaaattatgcattttttgcatagttaaaatatataggaaaacagcaatcacgatcaaagaaataacaaataagaatccaatcatcaattcaaaagttaagttttgagccgtatatcctggaagcttattaataaaggcttgaattgggtatgtcttggcatccttataattgaatttataattgctattctttgaaacaactgcagaagcggctacattaggagcgaccatccgcagttttttccaagttttcattgagccataaacaattggcgcaatattaatcttggcgttatttacaaaaccaacaattttatattttttcttagagccattcagagaaatttgatctccaagcttgtagcctttgtctttgaaactactgtctactgtaatctgattaccattctttgcttttttcccagcaattatatcttgatcttgataaataaactggtcttttttgatgcctaagaattgagctgaaattgagttttttccctttttcttaactacaattcctaattgaccaataattgcttcattcttgccaatttttgcgttttttaaatcgtcttttgtcagaattgactgactcatgctgatattggcatttttatttaaaacaatcttttgcgcattccaattttcaattgcttgtgtattctgacttgctaacccaacagccaaagatgacaacataaaaattaagtagctgatcaaaaagatcatcaaaataatcaagccatagcgcaatttttcatgcttaatttctttcagtgctagaaacataactacatcccctttgctagtatgtccaggctcttcttatagcgcgccaagttcttttcctgattttcgggatctgataagcataagttgataacttcatgactaagtaccatggcactccacaattgtggccccatattcaacaattgtcttgaataaattttgaaattatgtggtatcaagtactcattttgcgacatatgcaatttcatcattggttcatatttactgtattgaactttatcaataaacttaactactcttgcataaaaatgattaggatcaaatttttcattaggactcatcccagcatgaatgtcttcaatagcgatgtgatacatataaacatatgcatcaattaaatcatcaaaatatttataaaatgctcctcgagcaatgttggcattcttaacaatatgtgacaccttagcatctgctaacggataagtgctgaattcttctaacaacaccgcttcaatacgtctacgtttagcagacggtaaatttttaaaagtttgcttaaccattttgttttccccttttccaacacaaatgacgacttgtcatcaattacttatatcatagctgattttgacgagttgtcaatacatatacacaaaaaaagaaggcctctgccttccttctctaaactaaaactcgattatagtagtacaacctagcaacaccatcacggacgctaaatttgcttaatgcacaattatttggcgtatctatcttgtccatgtcgccattactcaaataatgagctgccatcattcgaatcaaacgaccatgtgccactactaataccttaccttctggatatttttgatatatttcgtctaaaaagttagcgcaacgtgcttcaaactctccgtagccctcaccatttttggcatatttaacatagtcgcgagtaacttttccccatggatcaacgacatccggatattccttagcaatatcatccatcttcttgccgtcccaatcaccaaaatcaaattccagcaaacgtttgtctaaatttaatttctttttacctttagtaaaaattttcgcagtctctactgctctcttcattggactggaataaacaacatcaaatttattttcatcaaacttagcggcggattttttagcatattcacgaccaaattcattcaagtctgcgtcaacttgtgcgccctgaattcgattatctttattcacgtctgtttgtccatgacgaataaaaactatttccattttttacatcaccttttcttaaaatcatacccttatttaactaatctttccatttctttactgtttttttagcgttttgaaatttaaaaagcttaaaatataaatagataattagaaaggggaaacattatgtcccgcgttacaattgaaagagatggtctcaccttagtaggagaccgcgaagaaccattcggcgaaatctatgacatggctatcctcatgcatggttttaccgctaaccgcaacactgaattattaagacaaattgccgatgatctacgcgacgaaaatgtcgctagcgtccgttttgactttaatggtcatggcgaaagtgacggcaagtttgaagatatgactgtgccaaacgaaatcgctgacggcaaggcaatcttagaatacgttcgcaccgatccacatgtacgtaatattttcttagttggtcattcccaaggcggtgtaattgcatcaatgcttgccggtctttatcctgatgtgattaaaaaagttgtccttttagcaccagctgctcaattaaaagacgatgcacttaaaggtaacacacaaggcgcagtctatgatcctaaccatattcctgatactgttccactagtcggcaataaattaggaatgaaactaggcggattttatctccgaaccgctcaagttttaccgatttacgaggtctctgcccgctttagtggcccagtatcagtcatttatggtactaatgaccaagtagttaaccctaaatatgctaaaaaataccatgatatttatgaaaatagcgaacttcatgccattacggatgtagatcacagattcactggtcaatacaaaaagtcagcatcagatttaactgctcaatttttaaaaccattattttagcgccgagtaaagtcgaactcagtacgaaagacgtaatgatccttagtacttacgtcaggttcaaattgaaattcaaaatcattaaagtcctgcaaatctgtgggattttttatttgcttctcggcaatgtagcgcaccatttcaccacgagccatcttagcgtgaaccccaacggtcttccacttaccattttttagttcctgaaagtcaaccgtaattaattgtcgtccttgactcaaataaggtttaaccaaacgtgtatattgcttggaagccaaatcgataactatattatcttcttgaaataaattttcagcgatatcactgccccagaaataatacaagctataatcacgaaaaccaaccattttagtatttaattctaggcgatatgggcaaacaccatcaaaaggccggagcataccataaaatcctgatagaatccgcaaattcttttgaatatagtcaagtgcaggttgtgtaaataaatccggagccatatattggtattgaattcctgaaaaagccaaaattgcaggggttaatcgttcatccaaattcatattttctagttgcaatatgctttgcttagtcacattttcactagcatgccaaaggtcttttaactgttcatttgaccttgacttaagaaatctttctagaattcgtgtcttatccaagaactgcggttttgactgaattggaaatgaatcacgatcaattttcataatttttgcaggtgcaataataattttcatttttagattttgttcctttacggtaaacttaaattgtgattaataagtcatgtggtaataagtcaaatgaaaggcgatgatatttgttctttttgatcataaatttgagtatatgaaactaagccttggtaaaggttgattttttaaatgttaaacttttgtttacttttaaatttagaccaatttttgaaattaagacctcggtgtcctgtacagtttgtcatctttgagcaatttaaagataactcgtactaattttcttgcagttaatgtgcaagcacgtttatgcggcgagtagacagcttcatcatacttcttttggtaatattttttgaaaacaggatcatgtaatcttgctagattggcagcttcaatcaagtaatatcttagatatctgtttccagtcctggccattggagtatgttcgttgctgtgatctcccgattgatattgattccaggttaggccggcatacttagccagctgttcttctttatcaaagcgatcgatacttccgatctcagcgataataccagctgtataggttttgccaataccgggaattgattccagaattttgctttctggtaatgcatcaacgatacgatcaattgctttttctagatctttaatagattcattaaagctttggatcatgttgtaatgaacagaaagcactgcatcaattgaatcagtcattactttgcctaagcgatatgaacctctaacagctttcttaattgctttagccaaggtatctggatcggaaaagcgtcctctgcctttaacctgtaagtaagaaattaagtcttcggtaggcatatccgcgatctcatccagagttttactatcggttacaatagacatcattgtagcaccgaaaagaggagtattaatcttatctttatcgacagtgattagtttattaacccgataatataaagcttcaatgaagtgctgtttggtacgagtcagttcttgaactaattcatatctggtacgcgttaaacgctctaaagcaagatagttgtcttgtctggcaatgcttactcgataatgtccaaagcttagatacaaagcaatgtaataagcatcgagaggatcagttttactttcttcaaagactttatgaaacctgctggtttctttggggttaattacatcagtctctacattgagcttttgtaaatcttcgtcattttggaaaaagtaagcaggatgaaaactgtaaatagatgtagcttccatgccaataatgatttgatcatagtgtttattttgagctagatctaaaatttgttttttcagttcactagcaccataaagatcattgacaaagctatcgttaattaagcgtttgttttgatcttctgaatcaagtgcaacgacctgtaaatctttagaactaacatcaataccgacaaataatttcattggaaatggcctcctttctttcaaatttctgatcatagattttgatcttcacatgttaacccctaattacagttcttaagttcaatctcgccagtataagtattcactggttgcttctttgaaagctgcacctaatcccaattgctcaaggactagcaaaaagaagcaatcaatacagcatgtgagttagagcataaaggaactgcctgggtggcagacttataaagcagacaaaactgcaggaggtgataacctagaccagttgaccaaagccaatgacaattagaggctaacatgcgaagatcaaaaagcaaatactaatttgattaattatcacaatatgactaattacaatttatataatacgaggaggaaaaataatgaatcctgattttgcaattgtcttaaattatcaacttaatgataaggctgatgccgactttttagtaaaaacagcccgtaatatcggtgctcgtgcagtgatgactgacaggcaaactgaagatttcaaaacagcttgcgctaagtatactatttttttagctaatccagaaaatagtactgacttaactaaggataacgtcattgataccatggtcaataaccgtaaagctggtaagactacaattattaatgtgcccgttgaagcaggcaagttttctgccgcaactcaagcaatgctggatacgatcaatgattggatgcaccaattcggtcacgccttcaacgaaggaaaaactagtgctttaaccagtagcgatggctttattttagaaaatcgccacgcaaattaccaaaaatatgtcttcttacctagtcctcttcctgacaaaatcgtggtagaaggcctagtcgaagaacctaaccgggtagaatggattgaacatcgaactgatcttgattttaactataaggatcaaaaattaactattaacttagtcaaaccagatgatgagtttgcttggcaagtgttgcgaattcaagcccaccgacctgaagatgacattttagaaacgaaattttagtaaaaaggcgttctttgtagcagaacgcctttttacaaccttatgtaattgctatttctattttcaaaaaaatttattcttgcttaagctttaactactgaaccattatcaaaaaattctctaaaacgacgtgcttctttatccagagtaatttcatcattaacttgcgataacttatagccaacaaaataaggtggcgcttcaaaacgtgtaatatatttagcacaaataccgtcatcattacgcggataaaagaatagattataagaatcgcagcggccattatacatgatatttaacaaatacttggcaccactttgaatccagtcagcccacaagtcaatgctatttttatctaacaagttaatattgagctcagtgtagccttgaacggggtgttcagcaatgttaacttctaccccacttttttcaaaaagggtctcaccttcaaaattattcgggtgaatatatttatagccatcttcatgttcaaagccaactatctgcatatgcgggtgaatcaaggaaccacctgaatgtggaccatagttcttgtaccaaacaattgactcatattggtcactagcctgcactttttcaaaacaagctagcgcaaaatgcatcaacttgcgattatgttcctgcgtataagtactaatatcgccgttatgatcactagattcaattagtacagtctgccaggtatcgcgcaaggtcgggaacttattcttaagccaaatcatgtcatcttccttggcgtaaatatcagttaaattttcaacatcacaaaatgggcaaacgtttttcttcttatccttacgataagattgcggtttgcctttagcaatgctcatttgaaaaacaagtggatcattagtcatatttattcctttttttatttaaaatagtttaaaatctaatgggtaaagttttactataatgtaaaatattttgtagctttactagcataaaaatacttgttatactttgttaaagcaaacgtttattcgaaatttatcaagagacgggttttaataatgcaatctagaacagaaatgagaaagcgaaacaatcgcaacaatctctatcttattattattggcataattgtcgtaattgcaattatttgtggctttgtcattcataatcaaagggtagctgctgaacgtagccagcgtgaatatgcttctacccacttcaaccctaatgtaacaatttatggtgtgcaagtaggcaagcttactgttaacaaggcgactgctaagatcaataaacaagctgataatgtcgtctttttaagaaataaaaagattattgctgaaaaagacgacaaggttcaaactatcagccaagctgaagttaaaaatattttcactaagcagcatactgatttgccaagcaaacaaaaatacgttttcaaatccgccaaaatagatgaagcaaaaaagagtttgcaaaaaatacaaaatgctgtagtcacctataagatcaatggccaggaattcaagctaaaagctgatgacctaattcacgaagttacttacaaaggtggtaaatataaattcaccgatgtaaaaaaactgcatgctaaaatggaagcgatcgatcaagaagtcaaaactctaaagaagagttataaatttactgttcctactggtaacaaagtcaatggcaaaacgattacggtaaaaaacgaaagctatggttggggaatttatgtcaagaaggctgtggctgcagtagaaaatgcttttattaatggtcaagatgttgttggtggtagtaagtatatttatggcgagggttatagtacctatgctcatggttatggcaagagcaatcatggtattggtaaaaactacgtcgttgtctccatcaaaaatcaggaactatgggttgtccgtaaagggaaagttgccgttcacttaactgacgttgtcacaggtactgaaaataagagtaacgctactcctaaaggtgtttggtatatcatgtacaaagaatcacctagcgtattgcgtggttataacgacgatggctctaagtatgcctccaaagtacaatattggatgccatttactttgagcggctgtggcttacatgacgctagctggcgtagcgattggagtaagtcagcctatcttactggtggctcacatggctgtgttaacattcgtccagctgaaattagaagtgtttggaacaacgttttaactaacgatgctgttatcgtatattaaaaaataaagattaatcgcctacttcaattgaagcgggcgatttttttgcgtaaaattaacagaaaagatatagatttttgaaaggatcaaatatgttagtcatcggtattatttgcttggtggttgctgccatttcttactttaaataccttagtgaaaagaacggacaagctaaccaaaaacaagctgaaaacaaaaatgaggcaaaatggcagcgcactttagcaatcattttcctcgttttcggaattttattaatcggttattggattgcattacgctaaaaaagacgtgaattttcacgccttttttaaatataattgattaccacattacccatattagctcttccctttaaaactaaggtaggaccgccgccattgctttttcctttaactattacattaccaaggctaatgcttaattgattatcaatctgccatgataagggaacgtagagatttacatttcccattgaagcagttagattaagcacgactgtatcacctgctgctttagcatcatcaagatagatattggcattaccgaatgaagtttcaagattaattgactgtaaattttgtgaatgaatataacgtgaagaatcgccagccatcttttgattaattacgatattgtcaccatcttcaatcacatcttgaacatgatgatgtgttacttttgtctctgtatcagcatcgtcactatcatcgtcatcattccaatgaaaactcttcttgataacaatttccggatcttttttaaaaagcaagctcaatcccattgaaacaagcaaagcaataaacaaaatcatccaagaggataagaactttttaatgcccaggggacctgcataagtaattactaaaaaagcaattgagaaaacggacaccacaatgctcttatcaagcaagcccttaattaagcaagccacaaaaatgactgtcaaaataattgtccaaacgctaattttgaagcttaataagcctaattgactgatcaccaaaagcgcagctgcagcgattagtcctactccccacaaaattcttgcaaaactgtttttcattataaagaccttctttcatctaagcatgtgcgtaattctttgtagtatcgacgggatgcatatacagttttataagtatcatgaaactgtatcttgcaatctgaaatcgaccgagttaaaccataaatttgatctaaattaataattgtcgatttggaaatccgcatgaaacctgcgcccaaaatattttctaactcatacaatttatgtttaaccaagtatgccttatcttgtgtatgcaaaattacctgcttggcatctgtttcaaaaaacaaaatctcgttcagtggtaagtagtaagaaacattgtttctaaaacattcaatctgatcattgtgttcaataccttgtaatttcttataaagctgctctatttccggagaaatatttttagctttaataatcagttcatcttctacggcatctggatcaatctcaagttttactttcatgtttctcactcccttctgaatctgatatttatattaaaaaatatttcagatagcttttccatagttttgaactaagtggtaaattttggcttctaagtggcaaaaaaaataagacgacctctgtcgtcttattgcttattatcaatgtaaactagtaaaaaatgttatcagtccaaaaataattcctggaaaattagccgtgaatagcggccaatctttcttttcaccaagaattgcataaagtacccagatcgtgcaattaattgcagcaaccaacggctgaaccggattaccataatttccgttcaaattattaataatttgcggaatatatgaaacatacatcagtacagataataccgacccaatacgtccaatagttaaaacagtttttcggtctaatcctttgaattttttcaacaaatcgctcctttgtgcttcattataagaaaagctagagtcgattgcaaaaatcatactttagtggacaccttccattagcacattaattctcttaactaaaaagaacattattaccgcaaaggctacactgaccaaaccaacagccatgaaatattgtacttcagtgccagttgaatagaacttaacaatttgtgcattcactgcttgtccagttgcatcagccatgaaccacatactcatcatttgcgaacgatatgcattaggggccagcttggtcgtaattgataaaccaattggtgaaatcaacatttcagcaatttcaactaagaaccatgaaccaactagccaaaatggactaaccttgcctgctgtaccataaagcatccctggcaaagccatccacatataagatagaccagcaaaaactagccctgctgcaaacttgcctggagctgttggctgctttttccaatgttcccaaagccaaacgaagattggcgttaaaatcataatgaataatgggttaagagactgaaagttggctgctgtaaagtgccaattaccaatatgaagcacggttctttgagcggcaaacagagctaaaactactgagcctgattcttcaatgccccagaagatagctgcagcaaagaacaatggaatgtaagccttaactcgtgaacgctcaaccttagttacttttgaactacgtagcatcatcacaaagtaataaattggcagtgcaattgctaaaatagtcaataaagtaatgacattgtcaacgttcaattgaccaaagccggccattgcagctaatacaagggcaatcaccacgaacccaataactacccacttaataatattaagcaagtcacctctatcaataggatcattaggcgtcaaactttcaggagaaaggtattttttaccgccccaaacatattgcactaagccaaagaacatcccgattgcagctaaagaaaagccggcatggaagttcatttcattaccaaaaatatgaaagccaaaaccttgtgctgcccatggaactaaccaaggtgcaagaaatgatcctaagttaatcccaaagacaaagatgctaaaacccgcatctcttctgcgatcttcaactgaataaagaccaccaaccatgtcagatacatttggctttaataaaccagtaccaaccacaattaaggcaattgaagcatataacgccgttacaccggctggaagtgccaagacaatgtgacctaacatgatcaaaacgccgccataaaagacggtttttcttgaaccccaaacacggtcagacagccagccaccaactagggttgataaataaacaagtgaaccatagattgacatgattgatgcagccgttgtttggtccattcccagaccacctttggtgactgcataatacatgtagaaaagcaggatggcgcgcattccgtagtaactgaagcgctcccacatctcagtaaagaataacgtggacaaaccctttggttgtccgaaaaatgctgtatttgaatcttgtttccccaaataaaaactcccttcttatcatagataagcacaatagaaataattataccacgaaaaaataagtatccactttttacagtgaatccttatttattaggtaattattgcttcaaattaattgattgccttagcaactgcgttgttaacagccactttttcagcttcgatcaagtcaactttaccttcaataactttaatatccatcttaatttcacgactaagaagtggaatatttacctttggttcaaagaattctttaaattctttaagtctagttggagtatggaagacgcgagtagttactgtgatgaatgttgtaaattccatgtcaccaccgacagtcttatcaagccaatcccaatcttctctaatccagtcccaggctgcttgttgaccatgatggttgctgagcaaaccagcataccagccacgcaagtcttgtggtttaattacgtcagcattttcaaaattatcaacaattaacgcaacttcggccggatcaatcgtactagtaattgcgctacgaagatcaactttgtatgaaggatcagcagttctttgatattccttgattaggttttcgattaggttgtggctaccaaagttctttacttcattgattaaaacatacggacgaacatcagcattcattgcctctaagttgtcttcattagcagtgaaaatctcatgagctgttttaattgagtctttattttcagcgtaaagactggcacttaattcatatggacgaatttgtgcatcttcatcgctttcacctggcttaactttccagcccaaacgagcaacttgaccagcggataacttgtcataaagcttctttaagtccttttcttgagctgattcaggttcaacaaattggcgcaacttagcagcagtagcgtaaagagcattaataactacacttgacttcgagtcagcaaatttagtcaaaagtggcacaacagcagcataagaaatttgtttaccttctgctaaaagacgtaagtcttgcaataattgcaatttggcaattggatcaagttcatcaacatgagccaaaatatcatcaagcaaagtcttgtcatacttaacgataaagtgcgagttgttacctacattaattctaagtgggtgacctgcttcactacgtaaattcttgtagtaacctaagtcgatttccttatcagacataatcttaggtgccttgaagttagcattcaacggaatttgccattgtctaccaacgtctttaccttcaccaacgaagaattgttgttgtgaaagctttaagtgaccatcgctactatcaacatatgcactaactactggataacctggttgctttaaccatgagtgcataatcttgccaatatcaaggtcagttgcggttgaaagagcatcccaaagatcgtcaccagtggcattaccgaacttgtggtggtcgaagtaatacttcaagccttttcttaaggcatcgtcaccaagaagtgaacgaaccataactaacattctagaacccttggcataaacaatggcactgtcgaaggcagagtcaatatctgctgggtcattgatttccatttgaattggttgaacaccgtcagtagcatctctagtcaaagctgcaggtgcttcactggtttggaacatttcccaaatatgccaatcaggttctagaccatcaactgccaagtattccatcatgttagcaaaactttcgttaagccataaattatcccaccatttcatggttactaaatcaccgaaccattggtgagccaattcgtgagtaataactgtagcaaccaatttcttcatttcaaagctagtattgtctggatcaagcagtaaatatgcttcacggtaagttactaacccccagttttccatggcaccagcactgaaatctggcaaagccaattgcaatgattgtggaagtggatacttagtttggtaaaattcttcgtaaaattcaattgcgttcttagcaacacccaaagcaaagtctaattccttaggcttgtgggccttagttgcataaacaccaattaagacgccatccttagtgtgagtagtctttgattgcaaatcaccaaaggcaaaggcaaccaagtaactagacatgcgaacagtttcttcaaagtggtggtagccgtccttgtccacttcaacctcaggcatattggcaagagcaacttcgccatcttcttcatcccacttaagcgcaagactaaaagtagccttagcttctggttcatcaacacatggaaaagcttgacgagcaaaagtagtttcaaattgggtaccaataatttgcttcttcttaccttctaactcgtagtatgaaggataaatacccatcatagtatcagtaagtggtgcactataagcaatttcaattacagccttgctgtttacaccagttgaaattttgatagcttcctctttttcaagtacttcaaaatctacctttttaccatcaaccttaacgctgtcaatggtcatatatttttggttaataaatactggattttcaattacttcaccggtaatcgttgaagtaccattaatttctttttgtttacggtttacgttaatgcgcaaatcatagtgttctggatggaaagtttcataaaaacgtttaactgtcattttttacctcctattaacagctcatttacttttaattctaccaaaataaagaaaaaagcgctcaaaaaaggctatttcttattgattgtaaggatgacgtttcagttctgtaacattgctgtcatattgagcttgtactatagaagcatagtcattaagaaataaataagttttgaaagaattaattaaatttaataaggaatgaatacatcaatgaataaacatgttaaatctactttagtaaaaatcttagctgccttagcacttgcctttgcttgtgttgcagttgcaaatgctttttctaccaatacttcaactactcaaactgttcaagctgcaagaaagctttcaaaagctgaaaaagctgctaagagatggatcgcaatgcgcgaatcaggtggtagctacactgctagaaacggtgtttgttacggcaaataccaattaaacattggctacttacatggtaacctttcacctaagaaccaagaacgtgttgctgataattacgtttacggtcgttacggttcatgggttaacgccaagagattttggttagctcacaactggtactaaaattaaattcctttaattcccaaaagctaaagaaaaccagcttagtccaattgactaaactggtttttgttttactcaaaattatcttgcttgataaaacgataaagtgcaatgactaaaactaagatcgagcacgccattcctacataggccattgttccaatgtggacagcattgtcagcagcttcacgggctacttgattttccattgcatagcccacaacccatttacgcattaataccggcgtcaagacaaaactaactgtactaataattgaagtcactaacgctacattacgcgaatatggttctttaaagaactgtgctaatacgcagaatgctggagcaatcatcaatagcaagatccacataataatccagcgcccagaacttgaattcatcatctgcgcactattagtggcataacgatatgagctccaaagcgatccaccagataaggtattaagcaaactcaagaaataagatccacgttgtccataaacaccaccattattggacagaataccttgaacaagttggaaactatcagttgatccagccgatgaaaaatcgaccgacacaacttgcttcatataagtagctaaaaacatggtaactgagccacctaattctagtgctcttaacatgcttaattttcttgaagctttcagatgaaattccagacttaaaactcgatcaggatggtgactgtgaccaatgataaaaatccctgcaatgacgatcaaggctaagataaccaatccccaccagaatttaatcatggcgaaaaataaggctaaaacaataatcgcaaccgaaatatatggtcggtcagaaaaaatattccaaaagttcaacttaacatgatggtaatttttccttgatgcatttgcgacattttgattaataatcggctgaggattactaatttttctgctgcgaaattcttcacgtgttgttgctcttgtcttagtataatcggtccgtgaacgatctgcgccggcttggccgtgctcttttttcatgcgatattcacgccgcgacatatgtgccataaactgcagcccccttctcaaagcactatagtagcacattatcacttttttgcttgaattaagaatgaaatttcaaagaaaatttagctttgttttgcatgtgctaaaatgaatattaataattgtgctttttttagaaagagataactttttgaataaaactaaatcagcaaaactgccagctggttggcatatggccttttataccttatggctcggttgctttatcactgggatgggctattcaatgacaatgccctttatttcactatttatttcagatttgggtaattattctaaactgcaaatcaatctttattcaggattagcttttgcaatgacttttattgcccaggcaatagtttcaccatattggggcagcctcgctgaccgcaaaggtagaaaactaatgtgtatgcgtgcttctggtgtgatggctttaactattaccctaactggatttgcacccaatgcaatttatattattgtaatgcgttttattcaaggttctttttctggttatattaacaacgccaccgctttaatggcaagtgaaacgccgcatgaacgtagcggctgggtcatgagtcaaatgatgacggccgggactgccggaaatttggttggaccgctattaggtggtgctctctccagcttctttggcaatatgtttggtggcgcctgggggtatcggattccattcttcattaccggtgttttaatgttcatcgtctttttaggtacaacgttcttagttcacgaagactttactccaatttctcgtgaaaagatgaagccgatgggcgaaatcatgaaaagtttgcctagcgtgaaattgattgtggtgatgtttattactaccatgttggtacaatcatcaaccatgtcaattgatccaattgtttcattatacgtaaaatcaatgatgcctcatggcggggatgttgcctttgttgcaggtgttgttgcggcaacgcctggtcttggaacgctaattgcggcatcgcgaattggacacaagatggatgaagttggaccgttacgcgtattgcgaatcggcttagtcgtcggtgcccattgtttgtaccaatggctttgactaattcgccttgggtactagcaggactgcgcttcttattagggattgctagtgcagggatgttgccagccgcacagacggtattaactttaaacacaccaagcgaaagtttcggtcgaatctttagttataaccagtcatttcaagcagttggtgccgtgttaggatcgttaatgggatcgactatttccggtttttcaaattatgcaacggtattctggctaactggatttacgttactgatcaactttgtgcttgttttgatttttgcttggggaatttcttatcggaatagataggttaagcatattcctaaagtatggaatttaaaaatgtaataaaagagctgtaaatatcacaaaaaatatttacccggatttaaaattgaagtgcaacactaagtgttaaacaaaaaggccatgaagacctaaacttgaagtgacgaaaaatcaagaaaggaagatcttcatgaccaattcaaattctagcatttctaagcactatcatcaattaaccagcgtacaacgtggacaaattcaagcaatgctggattccggcataacttcccgtactgttatcgctcaagaagttggctgccataagtcgacaatcagtcgcgaaatcaaacgcggaagcgtcctgcaaagagacagcagctatttattgtatgagcactattacgctgatactgcacagatttattatgagaagcgtcgcaaaaactgctatcagcgcaatccattgaagcattatgctgtctttttgagaatgctctccagacgctttaaagctaaatttgatgccaccagcatcgatgagttcgttggtgaattcaaaaggactatgccaggctacccttgtcccagcacaccaaccatctatcgctatattgatcagggcttgctggacataagcaatattgatctgcctatgaagctcaaaagacgcaggaacaagcgtcatcacagccatggcggtcacgctttgcacaagaagcatcttggcaattccattgaacagcgtcctaaggaggttgaagacagaaaagctccgctgcactgggaaggagatctggttaaaggcgtcagacgcaagaatcagcctgctttaatgactttgactgaaagaaccacacgctttgaagtagttatcaagattcctgactatcgggcaagcacatgccaaaggctgcttcaaaaggagattgacagacatcctgcctggtttaaatcaatcacgtttgacaatggctctgagtttgcggatatgaccaagatcaagggctgccagatttactttgctcacccatattctccatgggaaaggggcaccaatgagaactgcaatggtcttttgcgtcaattcttccctaagggcaagagcatgaaagacaagtcaaaagcttatgttcaacaggcaactgatgccattaaccacaaatatcgccgaatcctccaatatcacacagcagaggaactcttcaagcaatatatctcttcataacctaactgttgcacttaatttgacaattcaggcaaaaaatatttacagctctttattattttcaattttttacgctaccatcttttcataaatgcgatacatccgattatcataagcgcacattgaaataaccagattatagcccgcgttttctttctgccacttttcaattgcgtcaactgcgatcttagttgcatcttctgcaggatagccatacacacccgtagaaatagctgaaaaaattacgctatgcaatcccgctttctttgccaaagccagtgaattatagtagcaagaagctagcatatgtgcatcactagtcttgccagcataaactgggcctactgtatgaattacatatttcgcaggtaaattatagccatgtgttatccttgcttcacctgttggacaaccatgcaaagtcatgcattcctcaagtaaccgtggaccagctgctctatgaatggcaccatcaacgccgccaccaccaagtaatgaattattagctgcattaacgatcgcgtcggctttcatcttagtaatatcgcctttaataatttttatgtctttcataattatgtccttagaaataaccaacatttctttctaccaccattctaacaccaacaacatcagttaggctcagaaagaatacaaagcatattgttatttttatattacgaacttgaattgatttctatctttagtatcctaatattaattttagcgttataggagcaacgaaatgaaaattttacgacgcagtttatgcatcatttcgatcaccttattttcttttgctttgagcattctcattcctagtgttcaagctagcaaaatagttttagatgatctcatcatatttttatatttaattggaatcgtaattctgggcattctgttgttgtctaacaaatttgattacctatcactcagtctaagcataatcttgctactcgcaactatcattgcttggatcagattcccaatgattagcattatttatactttttttatagcttatctgagtatatgcttactaacaatttttattgctaaaaggattaagaaataagtcactatgttttctaagaaagaactaaaaatcgtcaataacgcattaattattatctatttgctttcagtcggcccaacattcagagactgtaaaatattttgtgtaaggatgaataattccttaaatttatttcttaaaacattagaaaaaggagttcctttctcgtatgattggtttgaacaaaaaaacacatacagaaagaagaactccttcatgaatgattttacaaaaaatatagcacaagctctattcaatcaagacaaaataaacgatttattgcgcaaagagctacaacaggctgttaataacttgctagaagctgaattgactgcctttctgggctatgatccctatgccagaaatggctggaatactggcaattctagaaatggtgcttatttccgcaaggttgatacgcagtttggaccaattgaagtgcaagtgcctcgagatcgcaacggccagtttcatcagcacacgctgcctgactacaagcagcactctgatgttttggaaagcacgattatcaagctctactccaaaggcgtaactaccagagaaatcgctgacttgattgagaaaatgtatggcagtcattatagtccagcccaagtatcaaatatttccaagcagatgctccccaaggttgaggcttatcacaagcgcaagctaagcgacaagtttttctgtgtctatttggatgcgacataccttcctttgcgccgagaaacgtttgagcgtgaagcagtctatattgccattggcattaaacctaatggacataaagaagtcattgactactgcattgcgcctagtgagaacattgaagtctggacagagatgcttcaaaacatgaagtccagaggcttgaagcaagttgagctctttctttctgatggtgttgttggcatgaaagcggccttgaccaggacttatcctaaagctcattttcaacgctgcttggttcatgtcatgcgcaatatctgtgctaaagtccgggtggatgaccgcgaaaagatcatgaacgaattcaagcagatacatcaacagacaagccaaaaagaagctgcagctgtcttgcatgaattttatgcaaaatggaataaagcttatagccatgttatcaaaggtttgagggaaattgagcccgatctgctggtcttctacaattatcccaaacaaatcagagcttcaatttattcaaccaacatgattgaatcctttaacaacgtcatcaagcgtaaagctaagcctaaggcagaatttccaactgaacagtcgcttgatgtatttattggcatccaggcaatgagctacaatgaccgctatttcaaccgaattcataaaggctttggtcaggttcaggataccttagaatcctattttgattaaataaatgattaaaaaatcaatttacgagaaagaactatttacacaaaagatttgacagtttcaacattcatcttcggttttactaaatcaaatgatttcacaagtactttctttttaattgcaaatatcattttagtttgtttattcattatcattgctatcagaattgctaaaatcaatttcaggctaaagacacaatattatctactaggcttcatcactcttatttcaataatagaactagcctaccctggactgacattaaatgaacgcattagcaattattttgctatcggcaatattattttaggcttgctaactactaaaatctcaaagaaattagtttaaatataggacacaaaatgaaatatctgaaaacaccaagattaattaacagtattttgattactttacgtcatactgctataaattattgaattcttattactttaaaactacatcaggtattttcaatcattcaataaaaaataagactagcactaagccagtcttattttctattaatcaactattcttggggtgagaattgccatactgttccatcttggctacggtatgagccatcactcatctttgtaaatataaagacaacttttttcgtcctaattgtgtaaccgttttttgattcagttgtatcaactcggcccaaatcagccttaacacctgtttggggtggattatttttcttaatagaatatgcttgtaaaatttctttattaagtttagtcttcttttgctcagagttgttactatttttagcaactaaaatagcatgattctttgtaaaatacagatcaaaccaattacttaagcgattttctgtgttgtctactgttaatgttcgattaacccagttttttaggtaccgttgtttgattattgtagaaaaacattccaccaataactgctacaagtactgtaactactgcaattacggataacgtcattttctttttcatgatacgtttcctcttaaattcagcattaattatttggcactaagcctctcgaaatgagtcttacatttcctgaatacatgctaacccatcggtttctatttgttttaaaattgtgatccatccaggtactgtttctatacaaatagccactgtaggcaccatcattataataaactttagaaggtgttgtgttgagtaagttcattccatctcccctaccccaactactgtatctataaacattagatacatatttatgaagcggaccatttttgattggcccatacactttaacactctttgcttctcggactgtagtttctgaagcctgaacattctaactattggtagttaatactggagctacagttacacctacaagagtagcaaccactaataatattgactttttcatttttatttttcctcgtttaattttgatgttagtactactttcttacgaacagaagcaggtgcaggaatgctctttacatcatagctgtacaaatatcttctatataaggtagtagcactcttaccaactttttcacgcataacttttgaaagatatcctctataaccgttatactcaaaatagtgagtggcaccataatcataacttgaacctaaggtgatccaaattctcctaggtttatagtaatctgctcttagttttgaactcacagttgtttgtgtttcagctgatgcgctaacctgattcgaaactgtaaacaaactaacgccaactaatcctactagtgataatgaaactagttttcttgaaattgatttcatttttatacagataaagtaccttcactctctggccaaatcattattatttcctcctttcgtatcttgattatcccatgaaactctaatattacttctaaagttgcgtatcacaaaactactctttccaattagtcaccctatcttcatatcctagagaaataagcatggcttttacttctttagcttttgctatatttccttcatacaaacatttatagaaactcccacatgccttataaaaaagaaaatgattagtattgttcaaattcagtaagtaatctaaacaatttttaacctgatttccttttaagccataattacgccagcaataaaggtaattgatacaaatacttgctatcctatcttcatatttctctgaatatgaaaccttctcattgtaatgtttcaaaagaaaactaatataattatctgcttgttctgtagaaaaaacaggaatacagttatcgaataatcgcagcatatcaatattttctacccagttatcttttgcattaaattcagcaataattgtacttttgaattcgtcacctaactcatccaattgatttcgtacaattgctactgcaacaactactctgtacttaaatattctgctatcagataatttcattacttcttgcaaacattcttcgattttttctttatttgaaccattaaatgcacttttcagtttgttttcaagttttaattcaattaagtcctcttctgataaaaaatcatctttaatttgttccaaaaactgatctacatcaatatgatgggcaaacaagatcttaaatagactttctgcagaaattccttctattcctcgttcaattttagaataatggcttttatgaattattccttgaatcatttcatcttgcgttagtcctaagtgtattctttcttgtttcaaggcttcaccgatagtcatctttcatccctccaatttaacttcaactatactatctttttaattttctctccatacaaaaacgccttgctcaaaagcaaagcgttttttagcataagcaatatttgcattaacccttatcggcacctgcagtaattccgttaacgtagaacttctgcatgaagacgaacaagatggtaatagggatagcgatgattacacaccccgcaacgaattgtgcgaagtatgcggtcgcattacccttagctgtgtggaccatgttgtaaagtccatatgcaaccgtgtaagtcttagcatttcctgaagttgaaagaataatacctgagaaaatgaagtctgtccatggagcgatgaaagcggtcaaggcggtataaacgatcattggctttgaaagtggtaaaccaatgtgtaagaatacttgccacttagtagcaccgtcgatttcggcagcttcgtcgattgaccgaggaatagtatcaaagaatcccttagcaacgtagaagcctaagccggcaccaccaacgtaaaccaataacaacccgaagaggtttaacatgttaagacccttcaagatgtagtacaaagcaatcattgacatgaagcctggaaacatccctaaaaccaatgcaatttgtaagaatggttttctgaatgcaaagcgaagtcgtgataaaacgtaagcaactgaaatagttaagaaagttgaaattaccattgaaagcaatgaaataactaaagtattaatgatccagttaccaaatggatattgtggattagtaaaaataccaatatagttttgcaatgtgaatttttccggccagaaggtcgaaacgaatccagtatcattgaatgaaaaacttgctaagacgatccagacaatcggtaaaatccatagaatcgctaaaacaattaataggatataccgaaagattaatgagagccgtctttgatttgaatatgacttcatgtctagccctccttaaatgcattagtacgacgatatgcaatcagtgaaacagttgcactaataatgaagattaagatacccaatacggcactggcgttataacgctgttcctgaccgaaggtcaagttatataaccacgttaccagcaagtcagtcgatccggcaccattatacttactgttcattggtgcaccacctgtcagcaagaagataacattgaagttgttgatgttaccaataaattgttggataagtgaaggtgccatcacaaataaaatttgtggaaaagtgattgaacggaaaatttgtgcagcattagcaccatcaatcttagcagcttcaatttgatcttgtggcaagttttgaataatcgctgttgaaaccaacatagaaactggaataccgatccacatgttaacaagaataacggtaattcttgcaactaaaggtgaagcttggttatcaataaagtgaattggtgaactaatccaatgcaagttcatcaagatattgttcaaagcaccttggtagtccaagaactgcgccatcatcaaaagtgaaacgaattgtggtacagcccaaatgataacaaagattgttctccagaatcccttgtgcttgattccttttgattcaatcaaaagagcaagcaaaacaccaaagaagaaagtcgtagcagtagctgctacagcccagattaaagtccagcctaagactgggaagaaagtaccagctaagtcaccactcaaaacattgccaaatgcttggaagcctgtccatgagaaagcaattgggtgttgacgatcatagttggtaaaggccattgaaatcatgaagatcgttggcaaaatcgtaaagaacaagatacccaataatggaataaccatcaaggttgcgtgtaaccgagtatcaagcaaactcttaagttcttcaacgttagttggaatatggtccccatcacgcttcaaaatataattatgtctagttgagcgtaagttgacaatgtatagataaatgattgctacacataagatcaaggccaatacaccgaataacaaaatcaaaactgagtttgatggttgcttggttacataaacgccttgtgcggcatcataaacaacttttttggttttaatagtacctaatgtagctaatgaatttaaagtagggataccactgaggataaaccaaacaataaagataatttctgaaagtaagagtgaaataccttttacccattgtttgtttgccaaggcgttactacccattaagaagaatgataacttggtagcaatgtcaccttttgaccaaacctcgcgatatgttgctttaggagctacatgctttttctttagaaacataacttctccccttcttaggcaaaaaggctggacaatttttatttagcccaacccttgcttatgcttttagcaaattatttcttttcaatgttcttagcgagcttagcaagttgtggcttgtattgtgctggcttaatcttgccgtcgtaagtaccactgataagcggagctgcaccattccagaatgcggccatttgtggaagcttaggttgcaatactgagttacctggcttagccatttcgattacagcttcagcaaccgggtcactcttaacagcacttgagttgacagcgctcttcaatactggaatttgaccagcgttcttatgagcaattaattgtgacttcttgttagtaatgtaagcagctaaatctgaagcagccttagcattcttggtgttagcattaactgcgaagccttcaataccaaggaatgcttccatttgtacgctcttaccaccaacttcaatcttaggatacttagcaactgcgaagttcttacccaagatcttcttgatattagcagcgttccaaggaccgtccaaaatagcttgtgcgttacccttcttcaattggttcaaagcgtttgaagtttgcattacgcccttgttcttcttttgagctgcgtaccacttcaaagcattaataccgttttgtgagttgaaagttgagcccttaaggtcttcaccattcttaccgtaaagtgtagtacctgctgagaacattactggccacattacgtaagcgttagtaaagtcggtagctacaacaccctttgaagttaaagtcttccagtccttaacgtcgttagctgataacttagacttgttgtagtaaatggtttgagcttgttgtgcgtatgggaatgcgtaaaccttgcccttccaagttacaccctttgaagcaacatcgacatagttgtcttggatatccttagttgctgatggtgaaagtgggttaatgtaaccagcttcagccatttgacctaattgatcgttaggaacttcaaagacatcagcagcctttgatgggtccttaccaacgtctgtcttagcgttagctgaaccgttaggactttgaactacacgaaccttaatattcttgttcttcttagtaaagtccttagcaatttgcttgtagtaaggaacttgttcagtatccacccaaagagtcaagttagccttcttgtttgaattactgctacttgatgatgaattacttgagccgtttgaacatgctgctaatgataatgcagcaagaacagcagtactacctaaagccattttcttccaaatcttcatgactttttcctcctaaaaaatcaaaacaataaacaattcttaacaacagtagcttctgctacatatggttgtaagcttaattaataattatctgtactgcgttttcagtaccagattagttaacaatcgccttggtggaatctttatcaaagaagtgagctttgttaacatccaagcccatcttaaccttgtcacctggcttgtgataatcacgtgaatttacaatagcagtaaattcagtaccatcaacttcttggtgaagctgaatagttgcacccaaaagttctgaaacaacaacatttgattcaattactgaatctggccaggtttccataaatgcttcttctgagtgaatgtcttctggacgaataccaaagactaagtctttgtcgttgtagcctttttcttccagcagttttgccttaccttcaggaataccaatattcaagcctttgccatcagaaattcgaccgtccttgtagtgaacattgaagaaattcatttgtggggaaccaataaatccggcaacgaacatgttaactggcttgttgtaaacttcaagtggtgagccgatttgttcaactctaccaacagacattacaacaactctatcagccaaagtcatcgcttcagtctgatcgtgggtaacataaatagttgtagtacccaagtcttggtgaagcttagcaatttcagtacgcattaccacacgcaatttagcatccaagtttgataaaggttcatccatcaagaagataggtgccgcacgaacgattgcacgtcctaatgcaacacgctgtctttgaccaccggacaaagcacctggcttcttatccaagtactcttcaaggcctaacatcttagctgcttttttaaccttttgatcaatttcatctttaggcgtgtgacgcaactttaaaccgaaggccatgttgtcataaatggtcatgtgtggatataatgcgtagttctggaaaaccatcgcaatgtgtctgtcctttggagcaacatcgttcattactttatgatcgatttctaaggtacccttactgatgtcttccaaaccagcaaccattctcaaagtagttgacttaccacagccagatggaccaacgaaaacgatgaattccttatccttgatatgtaagtcaaagtcgttaacagaatatctgtcgttacctgcatattttttgtaaatatggtttaaatcaacctcaaccattgtttcccctactctctttaattatttttcattaaaaactttttcaatttcactcaatttcaactcagcagttgttggaacgatgtaatcagcttctttcaaaagctccttatcaccaattcctacggcaaattgacctgcagccttgattgcttcgactccagctttggcatcttcaaaactgattacttcatcagcctttaaccctgcaatttcttgcgctttgatgtaaatttcaggatctggcttaccatgatgaagtgttgctggatcaacaatgccatcaaattcatccataatacctaatctagttaaaatcttaggagcattcttagaagcagaagcaattaccatctttaagttttgcttcttagcatctgccaataactcagggatcccaggcaaaatgtcctttggcgtcattgtttctacttgttcaacaaatttagcgttcttttcagctgcgaacttttctttttctgcttcagtatatttgtcttcttgaccgccatattgcaagatcaagtttaatgaatccattcttgaaataccgcgtaagctatcgagctgagaatcagtaagtgtaatgcctaattctttagctaaattattccaagcagtcaaatgaaacttagctgaattagttaaaacaccatctaaatcaaacaataaacctttaagcattttgcgtttcaccttctttaagagtaagtttttggtctttaactacaacatctaaatcgtcacctttaagcaaggtaagttttgtttcattatgatcgacataaacttcgattaagcgaccacggtagttaatcttaaagccgtagtgatcccacttgtctggtacaaatgggttaaatttcaattgatcatgatcataacgcatccctgcaaaaccttgaacaattgctaaccatgaaccactcattgaagtgatgtgcaaaccatcaactgtatcgttgttgtagttatcaaggtcaaggcgagcagttctttcgtataattcgaccgccttcttttgcttgccaagttcagcagctaagattgagtggatacatggagaaagtgaactttcatgaacagtcattggttcgtagaagtcgtagtttctttccttttgttctttagtgtattgatcattcaagaagtagattccttgtaaaacatcggcttgcttgatgaatggtgaacgaaggatcttgtcccatgaccagtgttggttgattggacgctgatcttcaatttcgcttactggacgaaggttcttgtcaaggtagtcatcttgttgtaagaagatgccacgttccttgtcttctggtaagtaaatcttgtcaacgatgtcttgccacttcttcttttcttcatcagtaacattaaccctggcttgagcttccttagttgctaatggcaaacgctccaaagtgtacttaagtagccatcttgccatcgtactagtgaaccagttgttgttaacgttgttttcgtattcgtttggaccggttacgccatgcataacgtacttgttacgccacttggaccagtggactctagctgcccagaatcttgctgttccaaccaagacatccattccttcatccttaacgtatgaatcatcgccagtgtatgacgtatattgcttaatcgcaaatggaatatcagcattacggtgaatttcttcaaaggtgatttcccattcattgtgacattcaatcccgttgaaggtaaccattgggaacaatgcacctggtaagccttgttctttagcgttatggtatgcgcctggcaattgatcgtgacggtattgtaaaagtgcccgagtaacactaggatcagtaacacataagtacattggaacaatgtaagcttcagtatcccagtaagtagcaccaccgtatttttcaccggtaaaacctttaggaccaacgttaagacgttcatcttcaccgtaataagtcatgaataattgacaaatgttaaagcggataccttgttgagcggcatcatcaccagcaattacaacatctgatttgtcccagcgcttttgccaaacggcttcatgatcagctaagttttcttcaaaactcttagcttgaagcttggtcatcaattcagctgccttagcatcttgatcatctggtttgacgtcacgactagtaacaacaatgacatctttttcaagatcgtagctttcgccttcatttaactcaactgaaagcttttcatgaagttgggctgcttcagttgaaacatcacccttaactacttcaccattatgacgaagactttgcttaaggaggactgtaaattgtggaaccttgtatgggttagccttagtttcaaccttaatagttcttgcttcagcattttcacctaaaggcatccagaattttgcatcgtagttactgtcttcgttaacaacagttccatcaagtgctgcatcaaagtcgattttagctttaccacttaaaacggtagccttaactttaattaaagctgcttcttttaaggtaatatgtaaaaacctttcgaattcgaatttaaccttagtatccttaccttcataagtaaaacttctagtcagaagaccttggtgcatatcaagtgctaagtagaaatcactaaacttaactttagctaagtcaagtttttcaccattaatcgtaattcccatgttgatgaaacttggtgagttaggaaccttaccaaagtactttggatatccgttcttccaccaaccaacacgcgtcttatcagggaaccaaacaccagcaaggtaagtaccttgtaagctgtcacctgaatagccttcttcaaagtttcctctcatacccatgtaatcgttgccgattgcagtcatactttcttgcaatcttttatcttttggttcgaacttatgggtaacgaccttccaaggatcaatttcaaaaattcgtttcatatattctatctcccgtaatattcgaggttctctcttgtttacgctttcattatcctctagttgaaagcggtttacaatattaaatctgctgttaccgttatcaggattagttaatagaaaaagaaggtagatcttaatctgccttcttttttgcttattaaaagtaacttttaatgaacactcactacaaagccttttggtgccaattgattattctcataatcttgactaaacgtgttctcacaattgatctctactggatgatcggtcgtgttaaagtatgctttaattctttcattcccctcacgatcgacctcaattaacccattctctgttacgtgtaacttaattcgacctttaccgaaagtttcatcatgttgcaaacgaaagtcaatcaattgatgaactcgttgccaaaccgggccgtcttcttttgcccaatccattggtttacgacaatcaggatcgttgccaccagtcatacccatttcagttccataataaatgcatggactacccttttgcataaattcaaaagctaaggcttgcaaagccaaatcttggtctccattagctactgtcaaaattcgggctgtatcgtgtgaatcaagcatgttcatcatggctgcattggtagcatcccgatatttcatcaactggtctgtcaaacgactagttaattcttgtgctgacaacttgtgcttaaagaagtgatcctcaatttgcaaagtatatggataattcattacgccagtaaactcatcaccgttaagccatggacgagctgagtgccaaacttcacctacaatataaaaatctgatttaatatcagtaacgaccttgtggaatttcttccagaagtggtggtcaacttcgttagccacatctagccgccaagcatcaatatcgaagtattttacccaataagtggcaatttctaataagaaatcctgtacttctggattagctgtgttcaactttggcatatgcttttcaaaggcaaaagtatcgaacttaggactaccctcaccctttaatggatcgcggtaaggttcaactggatattcattaatgtggaaccaactagcaaaacgagaacttggaccatttttaacaacatcttgccattgcattgattgatcacccaggtggttgaaaaccgcgtccagcatgaccttcattccgcgggcatgagcttcattaacaactttcgcaaataaatccttgtcgccgaatgccggatcaacttgcaaatagtcaatcgtatcatatttatggttagaactggctttaaaaataggacagaaataaaggccattaacacccagtttcttcaagtaatctagatggtcaagcacgccttgcaggtcaccaccatagaagtcttcgcggccaggatgatcctccggattccacgctttaaccccttggggatcattagacttatcaccgtttgcaaaacgttctggaaagatttggtaccaaacagtatgcttaacccattctggcgttttcaccatatcaatttcatggcaatatggcactttgaaataagaaccatcttccataatggccttgtctacatcactgctaattgcacgatcacctacaactacactagtgccatcactgccaattacttcaaaggtatacttcaaacgatgatatggtgcttcaagcgtaatgccccaatgatcttcacactgccctacgccaattttttccatctcacatgttttagcctgttcaagtggcaaataattatcgcagtagtgaacaattacttttttaacgtcatttttagcactgtgaaaacgcacgcgaacatgacttggatcaactacaaaactatcttcactttcagttcggtgtcttaaagctgctaattgcatatattaattctcctttttcaacacaacacctgcataaggcatcaaagttaatttttcattagttaattgatattctcccgcttttagtgttgcaacagtataaccggctggtatttcaacagttgtcttttgatcactcaatgaaacagctacaatggcactttcatcatgtaaatcacgttgataaacatagctattcttatccgttgaaatcatataatacgttccagtctggaataaggcttcttttttgagttccagcagtttttggtaaaaattaaacatgctggtggtatcgttaatctcgttagctacgcaagcatcatcctgtttaatacctgttatccatggtttaacttcactaaaaccatggttctcagttgcatcccacggcattggaccacgggccggcaatttatgtgtttcactagccatagctaaggccgcatctttgctcaaaactttttctgcatcctttaaccatggcgctacaatttgatcttcgaattgatctgcactagtgaaatgtagattctttaaccctaattcttcaccgtaataaattactggaattccgcgttgcaaatacatcaacatcgccaagctcttagcctgagtttgtgtcttagctacgcgtgtagctaaacgagccatatcatgattattccaataaagagtaggctgcgatacgcctgctaatgtttgttgccaaactacttgattttgtttaaaggcagtcaaatctaatttcttaggctgatattgctctgaaaaacgttgatcacagttagaatcatcatcggtaaagtaccggaaggtaatcacactatccattaagtgattgcgcttagtcgtgtaatcaacagccaagttaacgctagcacttgcagcttcacctaataaaagcgtatctggataatcctgcttaatctgctcacagaaaggccgcatccattcctgcacctgtggtaagttagcgaaaaatggttccgcaacgattggcttgtttatgtccccatctccagttggataattttgtcgcaaatccgccttgccaatatggataaaagcgtctaaacgcaaaccatcaattcccttttttagccaatattcagctacctcaagcatggcgtgacgaacttcaggattcttccagtttaaatcaggcattcgcttatcaaataagtgaaagtatgattgaccggttccagctggatctggctcccaaacgctgccaccaaagaatgacccccaattgttcggccgcttgccgtcatgaccagcaaaaatatagtagtcacgatataggctgtcaggattcttgattgcgtcttggaaccaaggatgttgatcagatgtgtgattcaagacaaaatccatgatgaggtgaattcctgccttgtgcagatccttgattaagttctccatatcttccattgttcccatgtgtggatcgatggcgaagtaatttgaaacgtcgtagccgttgtccacctgtggtgaaacaaacactgggttcagccaaacggcgtttacgcctagatttttcaagtaagggatgcgcttacgaataccgttaaggtcaccgaggccatcgccattgctatcttgaaaagacttaggataaatttgatatataattgcgtgatcgtaccaatgtgccataattaatttcctccacgcatagtgtaacggattaaagaaaccgttttcaacaccatatctactgttatcgatatcaaaaaagcacaactcgcttttgagttgtgccttttcttctattcaattactaacttttagttgtgcttacgtttccgatcaacaccaaagcctaaaagacctgcaattgaagctaatgctaaaccaataatagatgctctgttttgtttttcaccagtttgtggtaatgtcttggcattcttttcagcttgaacagcagtattattactgtttgcgcgcttaccatgaacattgctattgtagctgtgattttcactattcaatcctgcggcctgattattccctgaattatgcttagtctcggtccgaatattttgaccattatttttggctttatgatgatctgctttcttacccgaattatcatcttttccaggtgtcttatcagttggtttattatctgaaggtgtagtattacctccattatcagtcttaacaactggaacagtgattgatgaacttactgaagctgaggttggagcattgtaaccatctttgatcttatatccagctggcacaccgtttttaatggcacttgaaggatcaatagttgtaccttcagtacctggaatagtggttctgccaacttcattaccattttcatcacggtagataatggttacttggccttgttgtggagtaggaggcgtgatttcaccgccaccgtttttagtataagtaatagttacaacagcatccttagtatctgcagttggagttacttcagcaacactatcttgacttggagtaaatccagtaaaggctggagcagtaaaggctggccaagtgctggttgcgtccttgtcaatgataaacttatcgttttcaactttacctaattgccagtcaccgtaaactgttttgacatttggatcagttgaaacagtcttggtgcgaccgaaccatacaacttgagtagaagtatcagtcttacctgttacaggattcttaacgttgattgtacgagttggatgagcgtacatatcactgttttcgcctggcttgtttggattgattgttgggtcggttggctcagtagtcttagtgtaagcaactgttacattagcatttggagtgtcagcattgaccgtctttgcatcaacctttgttgcttcatgcccattaaccgtggacttgtaaccgtcaactggggtgacatcatattcttgccaactaccttcagaggcaccagttgacttccaagaattattatccttagtagcaactgtccattctgtccaagtaatattaccatcttgatccttggtgccagcattttggccttcaccaccacggacaaagtgaacattttgggtaatgatgtcggtagtaccatcagtcttataaatcgtgattgtccgagtgacatccttgttcatatctttgtcggatggattgtatggaactggggtgatgttgtcagactttaagtaagtgatatgaacagcagcaccatttactggttgaccattgttaagtgccgaagcgctagaaacagttgtagtcttagttccattaacatatgaatcataatctgaaatttgtggtgcattcattgagacaaattctggttgaccacctaaaacaaacttgtggttttggatagtgcctgcctgccaattacctgtacccgtaacttcaccagttaccaagtcttcaataccattgcggccaaattctactgattgagtgtcaatcttcttttcagcttcacccggtttagtttggtaaatatcacgagttactgtcttgaacatgtccttgtacttaggatcagttggatttacgcctggagtggttggagtgatgtccttagtaccatgttcaacaagaacttcaattgcacttggagcagtagtgttaactgtttcagctgatggataagtgtaactctttgaaattacccatttttctggaacattactatcaattgtattcttttgagcttctgcacttacaattgctggagtagttgaagtaaattgtcccttaattgcatccttagctgtaaaaatcacattacctttcgcatccttataaacaatgctttgagtaaagttttcaggtgttggagttgcagcttcaacattaattgttgcaggaacatcaagataagtaccatcactaaagttaattcttacagtacccttaacgccatttgcaatattcttagttgaaggctggccattttcagcccaggtcatagtgaatgtcttggcagaatcattggcttgtgctgaatcagatgaattagtgccaccccagccattttcaagactattaacattaatcaaagtcttaaattgatcttgacttaagttagaaatattttgattttgcttgaaagttaatgactgattagtagttgaaccatagaagttgaagtaagtgttcatccaactgtcttgagtagataaaccaatgtagccgaataaatcactgtcatcaaagctatagtttacacgccacttagagttacctggtaggctttcaccagatgaagtttgttccttagagttaggatttgctggatcatagagaatatcaccggtaccatttgtaatatcccaattgctatttggagttaagataccattacctgctttgacccagctatacttaataacatttgcatcaaagctatctgacggatcttgggcattcacatacttatcaccttgtaagttataagtagtaactgtcttgtagtcacttgctgcactacccttaccatcccagtcagttctgtagacaatttgttgaatcttagcgatattaggatcaagttcatgactatcagtggttctgtgaactgaaatagttggtgtgatgaagctcgtcatactttgattgccatagtaggtatgatgctctggatcattaccagttatcataactggagcagtaaccgtttgtgtatccttacctggaacactaactgtaactggaatcttgtagaaccctggtgttgcgtcttgccctggcttcaaagtaatcgtaccagtagttgaatctactgttgcccaagttggaacgttatcacctgctacaaatttagtaccatcaggctttggtacaccatttgttgtaacaactggatcagatgctgtgctccctttttcaacagtaactgtcttataacttggactatattcacctgctggcacagcattaattgcaccatctttggtttgaacgtctaagtaagttgggttaccttgagcatccttatcagtaaaggtaagtctaatagttgcctgagtatcaccagcctttggtgcacttgcccatgaagcagtgtactgaataccggcattatctaagttaaaagtatcaactaaatcattcttttgagcgtcggttaaatcttgacctacagtaaccttaaccgggttagttacatccttagcagtagcaccagcagctttaatcgtcattggattactgtcaacagtagtgtcaccaactttaactgatacagtaccagttaagtcttcacttgcagatggagtagttacaacagttgttggagcatcgcccttccaagtaatgattgcactagtcttatcaactggcgtgctggttaccttaccatcttcaccaacagtgtattgattaattgcactaactgcttgacctgcagtcaaattcattgaattatctgtagtttcatgagctttatcaaatgcacttggagcagttacaacttctagggcaccagtcttagtggggtcagttggatctggaatgatcttgccagtgtgagtagcattgccaacataaactggtacgtgaactgtatccttagtagtatctggatacgttacaacaactggaattgtagtcaagccagttggcgtttcagtcgttggggcaattgttaaccaaccagtattaggatctactgtagcaaatggtgtgttatcaccaacaattttatacttagtaccttctggagccttgctacctgggttgattgttacagcactgccttgtggagttgattcaggatatgaaggatcttctgacttagattcaccttgttttacgttcatcggatcatatgaaggttggtaaacatcagcatcagggttagtgatatttaatggaatattagcaaaatcaacggtaccgtcttggtaggttacctttgcccaagctgacttatcgctagtcttcaaattaccagttgggttagttggagcatcttgaccgctcattaaatcttgccattccgttgcgtcagtagctgcattgtaccaatctacatttttaatagcagaaagatctggtgttatggttccatcgctagtccgtaacccagaaataccgtccttggcagttaagtcatttaaggtttgtttagtattaccatcaatagtcttgactactggttgatattgaccagaatcagttggcttagctacttcttctaaagaactacccattgcaactctttgtggagtccaccagttgaagttattcaagagtcggtttaagtatggagtttcatattttacaccatcagctggttgaccttgagtaactgttccatcaataaactgaaaactattaaacccagcttggttttgagcaagatttacttgaccgtttgagtgtaaaaatttaatttcaccattcttattttgtcctagagtgttgccggcttgagtaaagccagaaattgcattatcaccccagttgttttgagtttcaatattattgagataccagtaatcagatgcacctgtgcctttatttccttcatcccattgagcaaatggcaatttaccacctgcactagtaatagttacattattatttttattttcaagacgaagtaaagtacctgtttgatttccggtacgctggaaatttacatacttagggttggtaatagtaacatggttatagctatcaccagttccaccaccccacatagttaccaagccatatttaggagtattagtgaagaaccctttcgtaactgaatttagaactggctgagcattatcttgtaagtcaagcgtcgcaccttcatggacattcaaatcccacttagagcttgaaccactgcctgaaccaaatgagattaatggtgtagtagattgattgttatcaccagtacgaacaattattaatttaccttgattatctaaaacattggaatcagcattagtaatattagcagcaaaaccaacacctaatgaaataggagcaaagtggtaaccatcataattagttccaccattggcaccactaccatcattactttgtttagtattgatgttaacaacaccagttttgccaatgtttaagttaccagcccaaatagccattgagtgaccatcagccatgttggcatttaaattaccgtcaacttggacagtaccagtaatagcgctgttgacaagcatccctttaacatctttagattggccatttaaggttacggttgcaccttgttgaacatcaattgctggagcagtatcatttgtttcatcttcaactttggcccgcaaaatattgccaccagcgttttgatcgttgttagtcttagctgaacttacgttaaagatagtgttagaaccatccgcaaaaataatgtgtgcagctgaaacagcacttgaataattagaaacttgattccctgctacattaacggcttcacaagtgatattgttattacccttgaaggttaccgtagtatacggattatcacctatttgttgagccatcgtggtgttataaaaagcaccatttttaacatcagcagttacattttcaaatgtaaccttgttgttagctaaaagatcagttcttatgtcgtttccacccatgtaaattgggctaaaggcaccaccataactagaccatgaattatcataaccatcagcgttaatggttaaattcttgaaagcaatatcccaaggattactatctttttgattgttagtagtaaagctaagataattagcaccaaagttaatagcgtgaccttgaccatcaatatctaatcctccagaaatatttgaaccagttaagttcatctttccagagttaactagtggttgcggacgattaataccgttaacatttgtacccttattagcgacagtaatgtcactagttaatttaattgtaccgatattatagtcgtttaaagcattaactaatccttgccagtccgctacttcttgtgattgagtaccacgtaaattttgttgagtggtagctgcaacttctctaggttgtgcagctaaatttgctccaagctcttttgcaacttcatctttggtcttcttagcactgatattattgtcttgctcatttccaagtgataaaacattaaccttaccacgcatggtgctagttaaatcgttttagttaataaaaaagtccaatcttgttagactcgacttgtaaatagtaataatagaaaagagtctgatctgattgaactgccttaagcttaagcgttttagccaccatttacaagttagttttaaagatttagtgataatttgtcggcactggtatcgtttgtatgcaccggctgagtttactcatcagcgaaatattgatcaaattaaaactacggacagtctgattttggctttacttatctggcaagctaagacaggaattgaatcacaaagaagattctgtgaatgtttcaattgtttatcacactcacgttttaatcggcgttcacgtcagctattgcaattgatttatcagatacggcaagaaatgaataaaaaggttgacctgaatggacatttcttgatcattgacagctttccggtacctgtttgccaaccaattcgcaactatcgtgctaaaatttttcgcggttatgccaacattggttataaggccaccaagaaaatttacttctatggtttcaaagttcatgccattgttagcgatgacggttccattcttgattatgtcgtaacaaaagcatcagttcatgatgccaaggagacagttgaactgctggaaaatgcccatccatctaattactatcttcttggcgacgaaggctatttaggcaaagaactgcatcaacagctaaaacaaatgggttatgaactttggacaccatatcgtaaaaatatgacaggagctaaaaagcacaatgatcatcaattgatggctattcgcagaacaattgaaagcgacttttcgcttctgacctattacaatgccgagaacaatcgagcacgtagtctgataggctttcaaagccggttggaaattgcaattttagcttataatttggcttattgtctagaaagatttaactagcaccacgcgtataattcttatgtttatggacagatcgcgtatttaactaaccgtgttatcgaggaagttcacgaaaaagagaaaattatttctgaaatgcaacacgaagcggaagggttgtctgaatataatctactcttcactatccctgaattcggtgttcgaactgttacttctttgatcggtgaattaggagatattcgtcttttccatagtagtaatgctcttaatgcctatatcaggattgatcttagacattattatgaatcaggtaactttgttgccactgatcatattagtaaacgtggtgatgcgattgcacgtaaaattctttttaaatccatccaaaacattgccgtggcaagtcattttcatcctaatcatattaatgatttctatcagaaaaggaaaagacaatcttctcagccagaaactaagaaaattgccattgccgcgatacaccgtcttctcagaacgatttatcatcttgtaaaatataatcaaccctataattatcaaatagctaaagtataatttaagattgattattactattattgtgcaacccatgaaaaataaatctagttcatgagcttgttttgttatactttaaatttaactttgagccattttaattatttaattaacttttctatccagctaaattccaaggaattcctttaatatccttgactattcgtagaaaaccaaaataagcactgatgttaaattcatcagtacttacaattgtagagtccctttgttcaacccgtattgataacgactgcttacaataataaaattaagaccactagaataacagcttatggttttcgcaactttgatcattcccgtatccgaagtctactagctctcaaatctcatggtaaaaactaagctaaaagaaaaggtcagctcaagcagcttcgctacttaaactaacctcatcaaaatacctcatcagtactgacaaaggggtaaaattgtagagctaatttgattacttgcgcttcttgtttacagcagcaaggccaaacattcccaataaggtggaggcacctaagcccattaatgttaagctattgtcattaccagtttgtggtagttggttatccttagctgtcgttggttgagacgtaatcgtcttcccagtttgcatgttaggaacattaccttctagtttgccagtaacagcatttccattaggagtagtgtttgtaggcgtattagtagctggtgttccttgtccttgatgatcattagttgttggttgaccgccattagttgggatcaaccaacaactaatgatttgattagggttaccatccttgaaggtgtaagatgttggaacactttcaccaggaactaattgataaccatcaggaatgtgaatattaactagaactgtctgaccagacttgccaggattgtccggaagcttatcgcttggtgtctttggatcagttgttgttgtctctggcgttttgggatcagttggatctgtgtccttagtgtaaacaaaagttgtggtgtattggtatacagtatactggccactcgttactccaagagtacgaacaagacgataacctttaattttcttaggttggacttgccatggaccatttgcataccagcctttttgcggattaaccccattatttttttggttaggattatctaggttgaacgcaagcgtatcattattcctaagcacatttccttgctcatcaatgtacctcacagttactggtttgtttggtagcaagtaaacatgtatccccttagcgtaccaattgaaataatcagaattaagatatgtccctgtacttcctatataggagtaaccttgtttttcgtaatggctaatctcctcactcatttttttctcataattaccattgtttaggtcaatccttttgccatagctaccagcaatcgtaaagaatttgtacggtagatttgtttcttctggaacaagtaacaattcagtcctattactatcagaattattttttataaccttcttatacttgaaagttaaataaacatagttaggatcagctaacgaatttcgagtttgaccagtgattttaccctttaaaacaggttcagaaactaatttatatccaggaatattaatggctgcggcttcatagcgtgatgcatccggtgctttcttatcaccagcacggtgttgtggagattcaggggccatccagaaactatctagaacgattgatgctaaaatatgcccgttatctacatcaacatactctactttgattggtgacaatgatgcgtaatctaaattaatgttaatgtcttgcgtagtaatacctttcttaaggcaggcattaccttgtttatcaaaatagaaatacttattcaaaacttctgaattcattaatttataaccggccacagtaaattcttgatccacactatcccctggtcgaattgtggtctgcttgaaaggttgtttgaatacataatgaccattactaatcacttgaattggcttatgtagggtgacatcgcgaaaattcatagtaatgttgtacttactgggcagtggttgttttgctgttgttttatttggaactaatgttgatgaagtttgatgaccaaccgtatttgattcgtcgctaatccgaatattgcttgaatgggcactaacttgtggatcagtcacttgagtcgtggatgtattttgagcagcaactgtcgtattatctgccttggcattaccactaataatgaaggttaagcccaacgaaactgtcaaatcttttgtgtaaatagttctttctcgtaaattgattttttaattatttatttaatcaaagtaggattctaaggtgtcctgaacctgaccaaagcctttatgaattcgattgaaataacggtcattgtagctcattgcctgaataccaataaaagcatcaagcgactgttcagttggaaactctgccttaggcttagctttgcgcttgatcacattgttaaatgattcaatcatgttagtcgaataaattgaagctctgatctgcttgggatagttataaaagaccggcagatctggttctatgtctttcaagcttctgataacatggctgtaaaccttgccccatttggtatagaagtcatgcaggacagctgtggcttcttctttgtttgtctgttgatgcacctgtttgaattcgttcatgatcttttcacgatcgtcgacgcgtactttagcgcagatattacgcatgacatgaactaaacagcgttgaaaatgagcttttggataagtctgagctaaggctgttttcatgccaacaacaccatcagaaagaaaaagctcaacttgctttaagcctcgggatttcatgttttgaagcatatctgtccagacttcaatgttctcgctaggcgcaatgcagtagtcaatgacctccttgtgcccattaggcttgatgccaatggcaatatagactgcttcgcgctcaaatgtttctcggcgcaaaggaaggtatgtcgcatccaaatagacgcagaaaaacttgtcgcttagcttgcgtttgtggtaagcctcaacctttggaatcatctgcttggaaatatttgatacctgagctggactgtaatggctgccatacatcttttcaattagatcggctatttccctggtggtcacgcccttggagtaaagcttgataatcatgctttccaagatatccgagtgctgcttgtagtcaggcagcgtgtgctgatgaaattgaccgttgcgatcccgaggcacttgcacttcaattgggccaaattgcgtatcaactttgcggaaataagcaccatttctagagttgccagtattccagccatttctggcatagggatcatagcccagaaaggcagtcaattcagcttctagcaagttattaacagcctgttgtagttctttgcgcaataaatcatttattttgtctggattgaatagagcttgagcaaaatctttggtaaaatcattcatgaaggagttcttctttctgtatgtgttttttttgttcaaaccaatcatacgagaaaggaactcctttttctaatgtttaaagaaataaatttaaggaatcattcatccttacacaaactattttacagtctcaaatcaagctcaagtcctgtcactattgagctttcttagacgtaattagtttttatatgatctgtttcagtgcaatttgtatgaatcgtggcagttggttaataaagtcattgattacttcatctatcttttcaaaactattctgtttaagctcttttaattctgaaattaagtagaccaatgcatctacgaatctaatatcaggtaaggattcgttcattagatagaataaatctccgattgtcttatcatctgtattttgtctttcctgccaggtcaatagatcataagttattgctgtaactgcgatatagccacattggccatcatagctttgaacttgagatttatctaaagcaagatattgcttagacgtcttaaaatatgtttcaatttgccatctacgaccataaagttggatgatttcttcagggctaagctttgtctgagtagtagctaaaaccaaatacttgttcttgtttccacggttggagacaaagacgagctttaataaaaagctatgtccatgatattgagcctcaactatgcttgaataaagataatgtttctttttacggatgtttgaagcagccaaacgatcatacaagtctttaacgctatagcggcgatggcgataaatgtaataaatctttgaactcttcttgatcatgccaagtccatctaaaccgatcttctttaaaatccaaaacattcttggagaagaaaaccaagaatcgaataagacgtatttagcttctactcctaatcgtaaggcttgtctaatcaactctacagttacatcattcatctttctctgagcttgatttctccttttaccagaaattgaacgttcatcagcagtaatgggagcagctccaatcatatttttcttggttttggttgacatcaaggcaaagttaaccggcaagaaggtattgccatcgctccagcctaaagttaaaccacgatatccgttcaaatactcatgcttgtcatggtcatagactttagctagcaattcggtctttttagaaaaagaccgagccatcagcgtatcgtcaacgataaaagcaagtcggcgtcttttatcgataaatggttttaagcagccaatgagccgggctgcaatcaagcataatagtttttgccagttgattcttccatcgttaagtacattgcgagcagttctaacggaaaaacgtttgtcatccttagctctgaataaagaaagccgagcaaaatgtactgacatcagccaagagataatcatggttaatgaaacggtggatttacgcttaaaattgacttgtttagttaacttagctagaccaattagattaataaatcccggatttaaaattgaagtgcaacactaagtgttaaacaaaaaggccatgaagacctaaacttgaagtgacgaaaaatcaagaaaggaagatcttcatgaccaattcaaattctagcatttctaagcactatcatcaattaaccagcgtacaacgtggacaaattcaagcaatgctggattccggcataacttcccgtactgttatcgctcaagaagttggctgccataagtcgacaatcagtcgcgaaatcaaacgcggaagcgtcctgcaaagagacagcagctatttattgtatgagcactattacgctgatactgcacagatttattatgagaagcgtcgcaaaaactgctatcagcgcaatccattgaagcattatgctgtctttttgagaatgctctccagacgctttaaagctaaatttgatgccaccagcatcgatgagttcgttggtgaattcaaaaggactatgccaggctacccttgtcccagcacaccaaccgtctatcgctatattgatcagggcttgctggacataagcaatattgatctgcctatgaagctcaaaagacgcaggaacaagcgtcatcacagccatggcggtcacgctttgcacaagaagcatcttggcaattccattgaacagcgtcctaaggaggttgaagacagaaaagctccgctgcactgggaaggagatctggttaaaggcgtcagacgcaagaatcagcctgctttaatgactttgactgaaagaaccacacgctttgaagtagttatcaagattcctgactatcgggcaagcacatgccaaaggctgcttcaaaaggagattgacagacatcctgcctggtttaaatcaatcacgtttgacaatggctctgagtttgcggatatgaccaagatcaagggctgccagatttactttgctcacccatattctccatgggaaaggggcaccaatgagaactgcaatggtcttttgcgtcaattcttccctaagggcaagagcatgaaagacaagtcaaaagcttatgttcaacaggcaactgatgccattaaccacaaatatcgccgaatcctccaatatcacacagcagaggaactcttcaagcaatatatctcttcataacctaactgttgcacttaatttgacaattcaggtagattaataaatgaagaaattaaggatttagtatcattttctgtgtcgatttgttctatactgttcattgcgcaggatctcctttactttttaggtcgacacttaaagtataacgcagagagatcctgcgtttttatttttgataagaaaaagccaagaggcgcggggaaggagcgttaatcttagctttcaagtttcagaaataattttaaaagcagttaaaaagcacctctgagttatcagacgtgctcgttatcttttcgatttatctagttgattggcgccgaatcagcttcggtttaagcattacttcaccttgaggtgaacctgattgggcaatcttttgcagtagcattttagctaacatttcacccatttcaaaaattggttgtttaattgtcgttagctttggattagaaacttgatctaaaaagacaccatcaaaaccaataactccaaagtcttccggaattcgagcgccttcatcttgcaattgccgtacaacacccactgcaattcgatcactggcacagacgaaacaagtatcttttttaaattccttaaaatgttcatgaatcacatcttgcgcagcatgactatgattagaaacccgaaaaatttgtggtatcaactggtgttgttgcaaagtgttgatataaccagcttcacgtgaatattcaaatggctcttttaaatcaattccaataaagataatgtgcttatataaccggtctaaagcatattgagtagccatcttctctgctaactgattatcagaatcaacaaagtcatagccgcggtgattttcaccaaataaaacaaaaggcttatcgagtttatcaaataattcataatctttgtttcgcgccccggtaattaaatagccatctgcatgttccttttcaatttgattaggatccgtaactaattgcatcgcatactgcttagtatttaaaccacgagcaaaaccaaaaagcaagttcatatagtatggctcagtggtatcaatatcttctaaagtgacgaattttaccacgttagtccgattattaactaaagcctgtgcaattgaattgggatggtagtttagtttctccattgctttttctaccattgctcttaattctggcgttacttgctcaggatgattaatcactcttgataccgtcatttttgatacatttgcttctttagcaacatctgataaagtagtcatattattcctattctaagtacatctttctgaatcggtttaaatctttttggctaaagccaagctcttttttgaaaaatccatcaaaactgccccagccttggcgaatagtttccgtaattccacgaatagccggtccctctcccttggtaatattcattttagaaactaggctagcaatttcattatcatcggggaactgtttagccaaagcaaagtcatacaattcattggtcaatacgcgtggtgctagttaaatctttctagacaataagccaaattataagctaaaattgcaatttccaaccggctttgaaagcctatcagactacgtgctcgattgttctcggcattgtaataggtcagaagcgaaaagtcgctttcaattgttctgcgaatagccatcaattgatgatcattgtgctttttagctcctgtcatatttttacgatatggtgtccaaagttcataacccatttgttttagctgttgatgcagttctttgcctaaatagccttcgtcgccaagaagatagtaattagatggatgggcattttccagcagttcaactgtctccttggcatcatgaactgatgcttttgttacgacataatcaagaatgtaaccgtcatcgctaacaatggcatgaactttgaaaccatagaagtaaattttcttggtggccttataaccaatgttggcataaccgcgaaaaattttagcacgatagttgcgaattggttggcaaacaggtaccggaaagctgtcaatgatcaagaaatgtccattcaggtcaacctttttattcatttcttgccgtatctgataaatcaattgcaatagctgacgtgaacgccgattaaaacgtgagtgtgataaacaattgaaacattcacagaatcttctttgtgattcaattcctgtcttagcttgccagataagtaaagccaaaatcagactgtccgtagttttaatttgatcaatatttcgccgatgagtaaactcagccggtgcatacaaacgataccagtgccgacaaattatcactaaatctttaaaactaacttgtaaatggtggctaaaacgcttaagcttaaggcagttcaatcagatcagactcttttctattattactatttacaagtcgagtctaacaagattggacttttttattaactaaaacgatttaactagcaccatgcgtattggtcaataaataatcacgcgaaatggtgtcatcatcaacacctaatgcggtcaaaattaacgccgaagtcatgcctgttctatctttgcccgcactacaatgataaactaacgcatcttcttcaggtaattcaatcaattccgcaaaaattttagcaaattcatgttggctatgtgaattaagcaaaacctgttggtaaatttgaccaagccaattgtcacccatatcaggaatatgatggacaaagcgatataacttgttatcgcctttattttgcttgcggttttcagaataaatatgtgcatcaacaaaacggacatttgaccaaagcttgtcaggcgctgaattttgttcatatttagagcgtaaatcaacatctacggtaattcggcgttcaactaacttttcttgatcttccttcgacaaggagctaagtgaatcagaacgatatattttgttccactttacatgttgacccttgtcattttggtagccgccgatgtctctgaaattcagcggtccatccaaagctaatattcgatcatgcttcatttttccttgcctttcctcattaaagtgttaataccgtacttttattatatcattatcagtcatgtgcaaataaccgagcggcacgaattgctctttgccaacctgaataaagtttttcacgttcaactgcactcattttcggctcaaaggcctgtccaatcgtaaaggtatgctttaactcgtcaatatttttccaatagccaacggcaaggccagctaaaaaggctgcacccatgctggttgtttccagcgttttagcgcgttcaatttcaatccctaaaatgtcagcctgaaactgcatcaggtaattgttgttgctagcaccgccatcaacacgtaaagcaggaatttcaatgcctgaatcttgttgcatcgtatcaacaacgtcacgggtttgataagctaatgactgcaaagttgctttaattatatccttgtcagtagttccacgtgtaacaccgaagattgaaccacgagtctccgcatcccaatatggtgcgcctaacccagtgaaggcagggacaacgtaaacctcgttctctgatgtcgactcaagcgctgcttgttcagagtctggcgcatgcttaatcaacttcatcgaatcgcgtagccattgaattgcactaccagccacaaagattgatccttctaaagcataagtaatcttaccattaatgccataaccaatggtcgttaacagattattgttagagtctgttggcttgtcccctgtgttcatcacaataaaggcaccggtgccatatgtgtttttcaccattcctggtttcaaagctagttgaccaaataaggctgcctgttggtcaccggccatcccagcaattggcacttgtccaccaaagaacatatatgacgctgtttcaccataaatctctgaattcgagcgcacctcaggcaacatttgcttaggaatattgagcaaatgcaaaatatcgtcatcccacttgagcgtgtgaatattaaacagcatggtccgtgaagcattagtgtaatcagtcacgtgtttagcaccatcagttaacttccaaactagccaactatcaatcgtgccaaaaagcaactttccctgttcagctttttcttgcgcgccaggtacatgatcaagaatccagcgaatcttagttgcactgaagtatgggtcaataattaagcctgttttttgacgaatttcattactatagccttctttttttaatttttcagctaattctgttgtctgccgtgactgccaaactattgcatgataaattggctcacctgtatccttgtcccaaacaacggtcgtttcacgttggttggtaatgccaattgcggcaatttgattaggccaaatgcccgaattaataaaagcattggcaattgttgtttggaccgccatccagattttattagcgtcatgttcaacccagccaggctctgggaaatattggtgaaattctttttgggcagaagcaacttcacgtccatcatggtcaaaaataattgctctagtagaggtggttccttcatcgattgctaaaatatatttttctgtcacagttattctcttttctacaaaagcgctttcttataatattactgtttttctgatgcagattctagcagttaatgtaatagatacggtataatttttataaggattttttaaggagggcattttaatggaaaaaaatcaaaaaattgcggtaacaattgcgggtaacgatagcgacggcagcgcaggcatgccagcggatctgcattcattctacgcccgcggtgtttatggcatggggctgatgacagccgctgttgctggcaataccaaaggaatttttgcccaacaaattatgtcacttgattttattcaaaagcaatttgatgtactaaacgatgatttcaagattaatgcgactaagacggggatgctcgccaacaaagaaattatcgactgtgttgccgataatcttaaaaaatatgacatgggtaaaatcgtgctggatccggtcatcgttactaagcatggcgctaccctgcttgacgacgatgcttatcaaactttcttagacaaattattgccgctagctgatgtgattacgcctaacttttacgaacaaaaaaaactgaccggcttagaattaaataataaagaagaaattcacgccggggctaaaaaattgcaagcgatgggcgctaaaaatgttctgatgaaagggcgccacgattcagatacgcaaactacagtaaccgatatcttgttaactgaggacggtgaattccacgaatttactaagccattctttaaaaccgaccgcgtaaacggcactggtgatactttatccgccgtgattgcggcagaattagccaagggcaagtcagtgattgacgctgtaaaaattggtaaggactttacctatgacgctatttctcacccaattgatgttggctcaaaatggggcccaattaatcatttggctgcacaagaagaaaacgaataactataaaaaataccgaagctcagatttgaaacttcggtattttcgtgtctattttatcttctttaggcctactatttttcctgaatctagaacacttaccttcgttaattggttattattgtacttatatgatgtaccttcatccgaaagacgtcttgtgggtggtcatttgaccactctttttttacgcaaaaaaacagcaatgaaatcaatcattgctgctaatttgtttactttttctcaattacaaaataatatcctgctgtcaaaatttggacaattccttcaagtgcaatcgcccaatctgcaccgaaatgcgctacgatcagtccacctaaaaatgacccaatcggaatcatcgacgacaaaatagaatcgttaattgtttctactctacctaaaatatgtgggctaaaactctcttgcaccaacacttcaaagttaatattcatcatcacgatccataattcggacgtaaaaaacaaaatcaacaataaaagcggcatccctttgggaacaactggttcaaggacaattgctaaacctgataacgtgagacaaatgacgactaacctttcaattttgcttttatcaaaagttagtcgctgtaccagtacactgccaactaatccacctattgatgaagctaattctaagccaccataactaattgccgatttagtcaaatgttcagtcgcaaaatacggcaaacccacagatgaaatgccgtaaaaaagattagtcaatgcaaaaggcatgatcaaccgtgctatcttgtcttcttgtttcaaattttgccagcctttaagcaaatcttgcccataattttctgtgaaatattcattcgacttatttggaagtaataatttcctaggcaatattagtcgtgtataaaaagctagggcgcttgcaaaaaatattgcagaaataattaccgtggagtcaaatgacatccaagtaatcaataacgttgccgctgcattcaaaaacaaatccagcgtcttataagtcatttggaaaacgccatttactttagttagcttcgcttttgaaacgatgactggcaaaattttttcttcagcaggataaatcaaagttgagccaatcgttgaaatgacgtatacccctagcaaaagccaaatcactaaatcgcgccacaacttaacttgaaacagcaacgtcgctataacgctggtcactatctgcattagagttacaagcgtaagcatctttttgatataaacacgatcaatcagcggcccgaagacgaacgacaacatttcaattgatgagtctgcaacaaagattaacgacaagataagcggcgaatgaaagcgtaccttgaaaaaccacaaaatcgccatataaaatagcgaatcggcgatattggttaacactcgtcctgctaataatcgtctgacattgacattttctttttcgattaagttaaacattttcccattccttttcacaacactattaatgccgctgaaagccagggaaaattactattcaattgtagttaaaactcccagaccttcagctaaaaatctgggttgagcctcaagtagcgtttgacgaatgaaagaaaataattcattcgcaaacttaaacctaaaatgtcacgcattttagtcctcgctttctgtgaaaattaagttaattatagcatggatagcgacttatcaataatagtcattctatccttatatttttcgtattttcattcaatttcaaatcatgacttatgataataaccaaattaacttgcgctatttcctgcaatagttttaatagatcactttgtaactcaggatagatatttgccaacggttcatctagtaaaaaacattgcgcgccagtttttaaaacagcagaatataactttactaactgtatttcacctgttgatagttcatttatctttctatctaaaatcttttcaattctaaattgtggcgaatcaaaaacttttgcaaaatacttgcttttataaacctgacttttatcagaatatgatcctaaatagtccctcactgaacaattaggaagtggtatatcttgaaataaacaacttatatttgattctctcagttttcttttattaattaaatcagcatctataccatttatggttatttttccttcctttttcggcgtgtataggccaattattgttctgagcaaagtagattttccaattccatttctgcccctcacaatataaaatcctggagtaacaaaattggcagaaaaatttgaggtgaataagggggttttttcatctaaataaatattaaaatcctgtacttgaatcaaatttattttagaaattatttttttaccatcttgttcattcttcatggttagtaaattgttgattctcatccacgctactttaaacgattcaaatttaaataagatagaaaaaatttcatcaacctgtcccaaaagttgattaaaatattgaaaaataattgaaaaggaaccgattgtcatcttgccggaaatcactgataaaccgccattaataaacaatactaattgaaaaataagttgcaaaacaatctcgctattagacatatgtcaactaccctagactgaagtctagggcttagtggctcgttagcttgcgctaaccagaacaccaacttgcttagatacggacttgacttaccagcaatagtcttttgactattgccgatagaggtcgtctaattaccaaagccttttgagtccgcgagttgctaacggactacagcctttctaggctgctttttttattttaggattctgccacttgcctaatcctttttctaagatgttcactgccgcattccaatcacgaatatggtgcgttcaacagattggacaagtccattcccgatctttaagcgttagtttcttataaccgttttgtcccataatactgccacaagcatgacagcgttgagtagtatatttaggatcaattgttagaaattctttgtcatatagatctgccttataagccagcatgttcaggaagctgcgccaaccaacatcagaaatagcttgagataaggcatgattctttaacaggtttctgcttcttagttcctcggtaactactaaatcgtggtttttgattagtgcagttgagagtacttgtaaaaagtcactacgctgtcttctaatcttgtcgtgcagtttagcaactattagacgctgtttttgatagttttttgctagccgcaaattgcgtccttcttttttagcccggcgctgccggcgagacaagacacgttgagcgtgagccagtttcttttgggttttgcggtaaaagcgtggattagcgaccattgatccgttagatgctgtcaagaaattatcaaggttgagatctattccaatttgactctgcgtcttaggcaaggctttaacaaaggcaatatcgctgcctaactgcattgataagtagaactgctcgtcagcggtctttttaatcgtgactgttccaatacgagttggaatatgattaagcaagcgctctttgattagttttctaaagccggcaatgcggacaattcccagcttaggcagtttaacgtgctgagcatcaataaacctagctgtcccgttatcaagaaaagcttctttttgcttaggatattgacagttggtctgatatgaccagtcgctgcgttttttatggaaagttgggattccatgaccaatcttacgatagttgttccaagctttctgatagttttgaatcgcattggcaagagcgagactatcaatttctttaacacgtaaaaagctataagcatcgcggatattcttaggcttagctaataacgagttattaatgactacttcttctgccagcttagtctcataattattaagaatagaaaagacaaaaggcattgcttgatattgtctaacagctaaatagtgcttagcatgataattgcttcgattgcgtcctacataagagttgtatacaaagcgttgcgcatcatagtttagtttaatgattttcttttgcttagaactaggataaaagcgaagcttaacgccaaagtgataggctaaactgctcattcttttcatgtgtttcacctccttctgtagattagatatttatattttacaggaaagccgaacatatgtctctatttttttgaataaaaaaagctgactgctaggtcagcttggccctatccatccccgcattaagatacggggatttccgggcattttcattaaattgagaagaaaatctcgcttagcaacgcctaaaagcgttcttttagtattgctccatctctcagtttcgattttctctcttcgattaccttttatttcaatatatctgcttaaccattcagtaaaaccagaaaagtactcattataagcttctttcaattttaaactaacttcaaaaatcttagatcgcaaaaataaatatatgagactatatgcaggtaacaggatcgctattaacaataaaaaaccagacccagccataaataaatatgtaaaaatcaaaattgaagaaagggcgattgaaataatttgatttattgtttggaataaaaaagtcaacacttcagtagtatcttcagtaattttatctgctgtttgaaccgaattcatctttgtaactgctagcgtatccttcacatacagttctttcattattacatcattaacttccatgtttatttctctaaatcttaaaatctgaattttgttcataaaatatgacaacaaaagtctgataagacttaaagtcgttattaatacaatactacgtacaaaagcagccctatcagccttatatactaaggaatttaacagtattccttctaagtaaacattaaaagtcaaaatgccagtactgataatattcattcctaatagaagccaatattcaattttatactttttatcaattttgctaaaaatcgtatgcatagtgtcacctaactctgactagcagtcaaaaatgttaaaatataatgaatataaaattagataaattttatattcttatttatcctatgtcaatactaaataaattgatttggttttactttcatgctgtatttgatattatgtagttactaactaccaaataactatctatcaactacagaaagagaaaaatatgactgaaaaagcagcaattaacatccgtgttaataaagaaactaagcaaaacgcagagaaagtattaaacaaactaggcatcccgatgtcagtcgcaattgatatgtacttacgacaaattgcattgactgacggcattccctttgatctatcttccaagaaaagaaaaaagaaaaatgatcacgaaacagcaatgatggtcgcagaagctacagctcaatatgaaatcgttaaatccaactgggaggataaattagctgagtttattcctgactggatgaacatgaataagatgactaaagaggagcttgaagcaaggttagctaagcatgcccaagatgcaagagatggtaaaagtgtcgagattagcaaaacttttagcgacctgaataaagaattaggaatttaaatttcatacaagaatatactgtcaaatcaagtcctaacgtatctgtagaacttaaagagatatatagctctatcttgcaattatctcgatctccaaaaactgctcgagattatgtaaaagatcttgaacaaactatgcaagcgttaaattattttccagaaagatatagaaaaactccttcaggaaaataccgacgagttaatttcaaaaaatacgctatattctactttatcgaaaacgatactgtacacattattgatgtcatactagcttcatcaagtacagtattcaaatattaatcctttgccccattctagctattaagctatactagacagaagaaattaaacaaattaagggacaataaaatgagcgataaattaattaaaattgcatacctctacgaagatttaatgaatacttacggtgactcaggcgatgttaaaatcttgagctttttgctaaagcgtgaaggctacgacactcaagtcgacaatatttcacttggcgatgacttcaatgcctttgactatgatttcgtcttcttcggcggtggtcaagactttgaacaaaccgttgtagccaaggatttaccacggcacaaagaaacacttgataaatacatcaacgatgacaaacctatgctctgcatttgtggtggttaccaactaatgggtagttactataagaccaactcaggtgtaacaattcctggcttagacattttgccacttcacactgtcttcaagagcgacaagcgaatgattggtgatacccgttacatgaccgaatggggcgaagttaaggcttttgaaaaccactctggtcaaacttacttcgacaacaaggacaagttgcatcccctcggcgacatgatcgaaggctacggcaacaacccacaagaccacgtcgaaggcctgcgctatcgcaactttattggttcatactcacatggtccactacttaaaaatactaatgtagctaatgccatcatgaaaatgattatcgcttggcaccaagaacgtgttagcgaagccgaaaaagtcacagaataaaaaagacccagtcagaatctctgactgggatttttcattatcaaattaatttaaaacacgtttagcagctgagggataaaagtaggcactgatagcctgctttctcaccccttgactaggagttgcagcgtgaacatattgtccatcaccaacataaataccaacatggtaaggagctgaggcagaaccccagaacaacaagtcgccttttttaagatgacttaatgatacgcgtttacctttagtaacttgaccataggtggttctaggtagtgtctttttagcagcctttttataaacgtattgagctaagcctgaacagtcaaaggctgaaggaccagtagccccataaacgtaactcttaccaacttgttctttagcaagttggactacggcgttacgtttttctgttttgctttgactagctgcttggacagtttgcgtttgaagtggaacattaatgaatgaaattcctgtaaaaaatactgacaaaactgtggcaaacttaactaaactacgtttaaaactcaatttatttctccttaacacttcttatctttcaatgttttctatattaccggagaaatattacagccttgttttaaaatgactactataaaattaagcaatgtaacaaaatctgctatttcttgtaaattttgcttaacttgaaaaacactataattttctatatgcttaatacattaatttaggagttttttattatgaataagatagatagttatgtacgccactttttaatactaatcgcactaattttagggctttcactcgtctcagaactgcgtgaaattattgcctatgactcatctacccttggtatcatctttttaactgctgcaattatttgtacttttgcttcaggaatcacattacaatttcataaactaaattggattacgatcattttaattctgattctttctacgattatgatcttattctggctcaaaacccacacttttggccttattgtcagcatttttatgatttacaatattattgtatttctggtttgtgctattaacctaatttttcaaaatgatgctgaatgattaaatcatatgcttaatcataggtaatacaatcccaattaccactaatccaccattaaacaaaaaacttattaatttcttttcaaaaaagtatttcttcataaaaaaagacctttctattatgaataatcaaatcttcgggctaaaattccgacaattacgaaaacaacaacatatcactttagccaaagcagcagctggtataacttcaagacagtctctaggtaactgggagactggcaaaggcgaattagcatttgagaaagttttactgctactaaaaaaaatcaacgtccagccaatagactttttagagagtagtataagtagttacctcaaacaaactacttcacaaatctctgcagcttatgttaacaaccaagttgataaattattgcattatgctaataagtatcttgacataagccatcgtaatcttacagacagagttagctttttacgagctgctgtggcatgcaattattacatggacctaacgagtatagatctaacaactagttctgataaactacggatcatctcccattttaataaaatcttgaatggagaagaaatctggaattttgaggatatttattttttaggaaatacacaaaatctgatgagtccacgtgacatttatagtttagcctattctttaaattattatcgtcaaaagcacaaaaacgataatagagaatggatcaatgccgtttataatactttgataaacgctgaatttgtacttataaaaacaaatattaaattggctactgatttagacttacttttaagacaaaagtgggatttaccagataattatgctttcgaaaaaattcgacaaaattttatgcatgaactgctaaaatatatttcaacccaagatgaaagtgcaataactcagcaacttcacattcttgaattagaacacctatctgatttaaaaactggttttgaaacagcatatgaacaagtaaataaaatatattttcaataaactctcctcctagttagtaatattatcttatttctaatattgttagcgcttttgagactgtaaaatagtttgtgtaaggatgaatgattccttaaatttatttctttaaacattagaaaaaggagttcctttctcgtatgattggtttgaacaaaaaaacacatacagaaagaagaactccttcatgaatgattttaccaaagattttgctcaagctctattcaatccagacaaaataaatgatttattgcgcaaagagctacaacaggctgttaataacttgttagaagctgaattgactgcctttctgggctatgatccctatgccagaaatggctggaatactggcaactctagaaatggtgcttatttccgcaaagttgatacgcaatttggcccaattgaagtgcaagtgcctcgggatcgcaacggtcaatttcatcagcacacgctgcctggctacaagcagcactcggatatcttggaaagcatgattatcaagctttactccaagggcgtgaccaccagggaaatagccgatctaattgaaaagatgtatggcagccattacagtccagctcaggtatcaaatatttccaagcagatgattccaaaggttgaggcttaccacaaacgcaagctaagcgacaagtttttctgcgtctatttggatgcgacataccttcctttgcgccgagaaacatttgagcgtgaagcagtctatattgccattggcatcaagcctaatgggcacaaggaggtcattgactactgcattgcacctagcgagaacattgaagtctggacagatatgcttcaaaacatgaaatcccgaggcttaaagcaagttgagctttttctttctgatggtgttgttggcatgaaaacagccttggccaggacttatcctaaagctcattttcaacgctgtttggttcatgtcatgcgcaatatctgcgctaaagtacgcgtcgacgatcgtgaaaagatcatgaacgaattcaaacaggtgcatcaacagacaaacaaagaagaagccacagctgtcctgcatgacttctataccaaatggggcaaggtttacagccatgttatcagaagcttgaaagacatagaaccagatctgctggtcttttataactatcccaagcagatcagagcttcaatttattcgactaacatgattgaatcatttaacaatgtgatcaagcgcaaagctaagcctaaggcagagtttccaactgaacagtcgcttgatgcttttattggcattcaggcaatgagctacaatgaccgttatttcaatcgaattcataaaggctttggtcaggttcaggacaccttagaatcctactttgattaaataaataattaaaaaatcaatttacgagaaagatctatttacacaaaagatttgacagtttcgcgctttttgccaatattttagcatttttctttttacaaatattagccatgatattttatattcgtaaactaattaagattttttgaggaggatataaagatgaaaaaatcaattaaattagttaatgtactttctgttagtgtactgactttaggacttgtagcacctgtaaccacagtttctgctgatactgctaattctgagaatatcgcagtaaaaacaaacaatgaatcaacacaaagtacagatacatctggcttagaaatctatgatcaatacgttcaagtaaatcctgaaaaaaatcaattcgaattatccaaattaggtgaaaaggttttaccaactactgtatcatcacagattcagagtcaattaaatgctaccaataaagaaattaaggctaataattttattattgaccctgaaaccaaagcaattgtaaaatactcaccttatattaactttgctgctagcgttagtggcgctgcgcgcttaagaagcggatgttatgttcgatggttctggtggggctttagattctactttacttcaaatgcagcagtaacttggtttagagggattttaggtggcgcttctagtggagccaccataggaaacttagtagctgctgcaacgggccatgctatggctgcaactacaatagaagcatttggtatgtacgctgatagtatgtctagagatttgtatgattataataaaaaacaccgtcgtagtaaagtatatatggatctgaatggtgtatttcaatattcatttcatacattctaaaacatttggagaaataacatggggattaaaactttagtatccgtcattttaatcattatagtcattgtactagcctgctcaccattttataaaaaatatcaattattctatttaaacaaagtaggctattgggatatcctaatccaattcctagtaattgcaggtatcaacttcttcatcggtttaaaatatggtctgggtgccctgtttttattgattgttcccgttccactagacattattttcttaatctcaatgatttattcttaccttaaaattagaaaaatgaaacgcaaatagctcttaaaaaacgaagcaaattattgcttcgttttttgattgatcttatttttcttctgtttcggcgttagattcaaagccatcgcagccacgacaaccaacactgatccgacccaatccatcggcatcattactaacccaaagaaaaggacagaaccaactgtagctgaaaatggttcaaaagcatctaataaacttacagttgatggaattacataccgcagcgcgtttgccataatttgaaatggaataatcgttccaattacaataactgccgcagtatacagccaaacttcaggcttattgggaactgcatgaaattgcggatcaattatcaacaaactgattccagcaaaaatcatcccccaacctgttactaccatactagaaacctttttaacaatgttaaccggaatcaaagtataagcagcctcaccaaaagcagacaaaacgccccaaaacagtgcaactggcgtaatggccaaatgattaaattgcccatgcgttgacaataaaaacactcctaaaaaagcacataacgccgctatgatatccaatctacgcataacttgcttgtgcgtgatagctaaatatcccaatacaaaaaatggcccaataaattgcaagattgtcgcaatcgaagcattagccacttgaatacacataaaataaaatagctgcactggcaataatccaaatatgccataggctataataaccaaaacattgtgcttatttttcaacgtagctattggtttttgctttaaaaatcctgaggcaattaataaaactgctcctgaaataatcaaccgaatttgtgttaaccacattggtgtaatcttcggactaatatcaaacaatcctttagcgaataatcctgacacaccccacattacagctgccattgctgctagaaatgtccacaatcttcgtgtttttgctggtaccatctcgttcacctttttctttctcattcacctaataattaaaccacaaaaataaggatacctactgggcatcctcaactttattgatgagtttttttaactttctttttcttaggtgaaatattcaaggccatagctgccagcacaactaaaatcgaaccaatccagtccattggggtcatcaccaaaccaaagcaaataactgaaccaacggttgcagaaaaaggctcaaaagcatctagcaaacttgccgttgatgccttgataaagcgcagcgaattagtcatcaattggaatggaatcagggttccaatcacaatcactgccaccacatctagccatatatgtggcgtattcggaatatgcggcatctgtgggtgcacaatcattaggcaaattcccgctgacagcaatccccaacctgtaacgactaaactagaaactcgcttcaacacactgattggaattaatgtattggtcgcaactccaacagctgaaagcaaaccccagaatagaacgctaggcgttaaagcaaagtgattaaaacgcccatgtgtcgccagcaatactacgccaataaaggcacagatggcagcaagcacatctattcgccgcattacttgcttatgcgttacagctaggtagcccattacaaaaaagggaccaacaaattgtaaaatcgtggcaatcgaagcattagcttgttgtactacaataaagtaaaacaattggactggtaataaaccaaaaatcccatatgcgataatcgtccacgcgtcatgcttatttttcattgtagcgattggcttttgctttaatacggcagctacaattaacaaaataatgcctgaagttaccattctaatctgtgatagccacattggtgtaatctcaggactagtattaaatagactcttagcaaatagacctgatattccccacattacgcaagctaatccagctaaaaaggcccacaggcgccgttgtttttgtgtaaccattctttttaatccccaacttttctaaaactaacatactctatcataacaaaaacgggctagcttgaactagtccgttaattttttattcatcgtttttcttaattgggtttctgctaggcattagctgcatgaatgtagcaacaataattaaaaagccaccaagcatgtccattgggccaaagtccgcatgaagcagtgaaactgacaggatcgttgcaatcagtggctcgagggctccaagcatccctaccgtacttggttcaatatactgcacactagataagtacattgtataagctaacaatgttccaccaataataatataaacaattacccaaacatcaactggtgcaagttttggcattggttgagtgaagtaaattggtaaaaaggcaatgcctgcaaccaacattgctgcgccgattactggaatcggcccatactttttgaataatttcccaggtaatactgtattaatcgcttcagaaaaagccgcaattaagccccagaaacaagcaagcggtgataaagcaagttgatcgaatctgccacctgtagccaagatgaaggttcccacaactgctaccacaattgaaatcgcatcaattcttcgtggccacatcttacttctcaatgaagaatatataattatgaaaactggcgctaaaaattgaatcaccgtcgctgtcggagcattgctgtacttgactgctacaaagtacgataattgtgagctccccattcctaagaaagcaaaaatgatcaacataatgattacttttttatcatgtagcattgccttgacttggtccaagtatttccaacaagcataaatcataagcagggcgcctgaaaaaagcaaacgcagacctacaagccaagcagtatttacattagtgctagaaaataaaaattcaaccgccgtacccgatgcaccccaaaaacaggcaccgacaacagctaaagtcaatcctttataacgctgattcacattcacacatcctttagattaatgtttttcattgtaacatgggctaaaggaaaagttcaatgcttctaaagttgatttaatctatataacgtataacctgacacgctagccaataagccgattgtaaaaagcaaccaagattctggatgaaaggcaattaaaacaagtgaaagaaagcctgctgctaaactagaattgcgttccattcgctttttgccaaaaagcagaccgcacataatgccaaacatagttagcacataaaatgagtcaactaacagtaacaaattctcaataattgctagatcacttggctttacttttacactcaaatcagtaaaaatctgagcacagccaaaaaataccatcacaaatgcagctaagatcgtgataaagctaatcgtacgaaaaactgacttcaccttttgagttggcgtttcatcgataaaggtttttaagaaaaactcgtgatctttttttgctactacagctctgcccgtcttcttgtcataccagttcaatagaccagaaccaattagcataatagcaatcacagcaaactggatgacaattaaacgcatgaaaattggaaaggcatagattaccgtcaataacaaaattactatatagatcagctctgcataaagaaagaaatgcagacgctgtttatttttgaaaatagtttggaatgtttttgaattaggatcttgcataagacttctccccactaaatcttattacgaaaactcaaccagaaatttgccccactgagaatcaagccaataacagtggctacttgcatgcttggctgcatgaaaagcaagatcagtgataaaacaacagttaaaacgctagacgcacgaattaatttacgatttccacctaaaataccgacctccacacaaaagagtaaaacaacatataggccatcaccaatcagccaaacattttcaaagagattggcaaaattaccggtaagcggcttagccaaaatgtcagtccaaagctgacgtgcaaaagcaatacttaaaccgatatttgcccaaaagagcaagaattcaaataagcgaagaaatacgtttttagtaaatctaatactagtcagtgtttcccagaatgtatcgtgttttttaatcactatccttcgatcaagaaaggcaccaattgaataataaatcagaattgcaatcccttgaaatgcaatcaaatgcataaaaactttaaagtcaaacatcaatgtgaatagtaaaactactacataagctaactcaaaatataatacacagcgactaaactttcgctcgctaagccagtgcttcaattctcttttattcatatgatcactaatattgccattcatattttcactctcttttaataattatctaattatgtaaaaattgtataatgatttcaaaattttgtctagtccttttataattgatttagtaaatatttttcgaggtaaattatgaattatcccattttaattactattttgatcttcttgctgtgctttggccgattcatttggatcattactcacgaacgtcgttccttacgcgctggagttagcttagttatcaccttatttagttttttatttttaggtgtagtcattctggttaatatcgctgaccttgatccacattacaaagactggattttgccattatttgtgattgcgctatttgctgtgatggctggaacgattatctttgcattaactttgatcattatgtttttctacgatggcattaaaatcattatcaaagaaggaaaccgctggacaaattatctttctctgggcatggggatttccattatcttcttcctatttttatatcctcttgtgggacgaattagtcatgatagctggttaaagtatccttatatttttctatggctagtcatcatctacttagtcactatcatgatgatgtatactttaacttcttggattaatttaattaattggcacatgccgcacttagactacatcgtagtgttaggcgctggcattatgggaacaaaggtaacaccacttctggcagcaagaatttcccggggaatagaaatttatcacaaaaatcctggctctaagttaatcatgtctggtggccaaggacctggtgaagacattcctgaagcagttgctatggctgaatatgctgaaaaactgggtattaataaaaacgatattattatcgaaaataaatccaaaactacccagcagaacttgcaattctcacatgcactgatgaaaccaaatagtcgcttctgtattgtaaccagctcctaccacgtgtatcgcgctctggttttagctaaacgtcaaggactcaagtgtactggttatggtgccaaaactaagtggtattttactttaaatgcttttgtgcgtgaattcattgcatatctggtaattactaagaaaatgcaattgactatcatcggttttctagcagctatcatgattgctgctgccgcatttcatttttaatttattgcgttaagttgagaaacttagcgttttttattgatttatcttttaatttttttataattatagtcaaatctatagaaagcaaggtgtaactatgaggattcgtaaaaacaacttgtcaaactgtcattagtcaggatgacgagtcctgactttttcaaaaaagcaggttacttatgtcagaaacaaaattcaataaaactcttcttagtgtcagtcatgtggatttttcctaccctaagcgcaatttattcaccgatctaaatttttctattgctaatggtgaacgtgttgctctagttgggcctaatggaattggtaaatctacactaattgacctaattcgtaagcaaatccaaccagatgatggacagattatttgtcacggtgaaattaattatgtacctcaagtcaatgatcaaactgtaattaatgactcaaagagcgctggtgaaaagcgattagctttaattgaaaatactatttggcttcctagttctcttctcttattggacgagccgacagtttacttagatgacacaaatatccagaatttactctacttactcaagaattatgatggagcaattctagtagctagccatgatctggattttatcaaccaactatgtgagagaactattattctgcagccaaataatgcagtttattacccaggaaattacgcacagtatctcgaacaaaaacaattagataaacaagccgtatacaattttaacgaaaagcgagatatattaaagcaacaaattactgaaaaagtctctactttaaagcaaaaaagtactgactataatcattttgctaaaacacaagacaatactggtcgctatccttcgcgaagccatgatcatgtccaaaaaggattaaatagtcggcttaagcgagctgaacgtgaactggctaaacttccagagaaacagcacctatatcaacatcaacttaaacttcctgaatttaaaaagtggccgactaaaatacataattactctatcaaaatagatcaattactcagtccccaaaataagactttattatctaatacacagttaaacttgcaaacagccgatattattggattaatcggccccaacggctgcggtaaaacaacattgctcaaatatttagaacactacattaatcagcagcaatctttgccaccagccagctacattggtttaaatacgactaaacaaaagaaacctgccacagtagcagatttctttcacgagactattttgagcaaaactgaagttaagcgtcttttagttaaaatggatatgtttgtcgatttgactacaagactcacggatttgagtggtggcgaatttgctaaattagcattaatcaagcagctataccttgaacaagaatctattctattacttgatgagccgactaactatcttgatccagaaagtgtgacggccttggcccaaatgctaaaacagtcgcatctcacttgtattattgcatcccacaattgcaaatttttaacccaattttgccaacaaatctataaaattaagcagcaaagactaattgaattgcactaaagcatttctcttaaacacatatttgctaagcatatcctttactatcctcatctatattaatgaagatcacatttggtgctgcagaagtttggtgcgtttctttattatatttaccaccataatactcataacgaggtttccccttgccaaaaggatctattcggcaaagaaagatcacatatgtcgctttgaattctttttccggagagccacctagcccgccatagattatttcttcctgataagcgttggcaacttccagaatgttttctcctggttcttgcgaccctacttgaatgattaacccgtatttattgcgcctcttgtctcgcgcaattacatgtacgattgctttttcatctaagacatttctatttggatcatcaagtgattttgcttcctgaatattgagttcgggaagcattctttgtactgctgtaagaagctgctcattatacttcttcataattcctgcggccatgtgatccaccattgccggtgacatttcattttctaacataaaaaaatcctcatttctaaaaatctgagagttttatccctctattacttattacgcaaaaaaacgcaaaaattttttcggaaatgaagttttttcaattttttagttttcttttctaaaaaatggactgagtagcgatacaagcaggccgtaaataaaataccagcgataaatatctgccaagtcttgattttgaatccacaaaattattgcaattactgtcagtaagccacctaaaaagattgttgaacccatatttttatcagtaaagaagctgatagcagcacctaaggtaattaacgctaccaaactataaatgacgataatcactggtcctttagtctgaacgttaacatcaagcattggtgcgttagtaaacagctgccacacgataaaaccagctaatgcaatgccacatagcaatactagtaatctaaaaacaaaagttaaagtctttttcattatttttctcctgtatgcataataatactagtataacagcaatatcgcggcatacgaaaaacgcttggatttttccaaacgcttttttactattcttttgcttgcataaattgttttctagtgatgtatttgattgatttaacgtattgccccttgtgttgaattgaaatatattggcctgatggatcgtagccgccaacctttttcaacaataaattctttttcgtcttaggattatacgccttcacattgtaataccgctgtgtgcctttatctacttgagcatagcttgtttcctgggaaatgaatggattcaatctatcagtaaaagagttatgaaatgaaaaaatgcagattactcccactactagcactagtgccgttacaaatgcggttttaatagtacttttattcataatattcaccttcatcgttcaactattgttatactaaaatagtacaccaattcagttactttaacaattgtttctagcaaaaaaacgcttgaaaaattccaagcgtctttcacctaagccaaaaatctttttatagcttcttctacactagcattcaatgattggtgcttcgttgcagcataattagccaatttttcatgtaatgaaggatcaatgcgcacattaaaattacctttaaaaggtttctctggtataactccatcttccttacagctcattagataatcatcaatggctccttgaaaatccttctccaattcatctattgtattaccttcgtaagaaataagactcttaatcccctgaaccttaccaaaaagaatcttatcctccaaagtatattcaattgaaccttcataacctttatacttcatatattgattagtttttttcatctttattcatctctttgattttatcttgaatttgtttgatttgatatggtaatagttcttttctaggatgtggtttatgaagaatgatccgatcactgccctttttaaaaataattctagatccactcgtttttcctttattatcgagttgataatctagttcatgcaatagtgttttagcatctttaaagtcaaacgttctgagactgtaaaatagtttgtgtaaggatgaatgattccttaaatttatttctttaaacattagaaaaaggagttcctttctcgtatgattggtttgaacaaaaaaaacacatacagaaagaagaactccttcatgaatgattttaccaaagattttgctcaagctctattcaatccagacaaaataaatgatttattgcgcaaagaactacaacaggctgttaataacttgctagaagctgaattgactgcctttctgggctatgatccctatgccagaaatggctggaatactggcaactctagaaatggtgcttatttccgcaaagttgatacgcaatttggcccaattgaagtgcaagtgcctcgggatcgcaacggtcaatttcatcagcacacgctgcctgactacaagcagcactcggatatcttggaaagcatgattatcaagctttactccaagggcgtgaccaccagggaaatagccgatctaattgaaaagatgtatggcagccattacagtccagctcaggtatcaaatatttccaagcagatgattccaaaggttgaggcttaccacaaacgcaagctaagcgacaagtttttctgcgtctatttggatgcgacataccttcctttgcgccgagaaacatttgagcgtgaagcagtctatattgccattggcatcaagcctaatgggcacaaggaggtcattgactactgcattgcgcctagcgagaacattgaagtctggacagatatgcttcaaaacatgaaatcccgaggcttaaagcaagttgagctttttctttctgatggtgttgttggcatgaaaacagccttagctcagacttatccaaaagctcattttcaacgctgtttggttcatgtcatgcgcaatatctgcgctaaagtacgcgtcgacgatcgtgaaaagatcatgaacgaattcaaacaggtgcatcaacagacaaacaaagaagaagccacagctgtcctgcatgacttctataccaaatggggcaaggtttacagccatgttatcagaagcttgaaagacatagaaccagatctgctggtcttttataactatcccaagcagatcagagcttcaatttattcgactaacatgattgaatcatttaacaatgtgatcaagcgcaaagctaagcctaaggcagagtttccaactgaacagtcgcttgatgcatttattggcatccaggcaatgagctacaatgaccgttatttcaatcgaattcataaaggctttggtcaggttcaggacaccttagaatcctactttgattaaataaataattaaaaaatcaatttacgagaaagaactatttacacaaaagatttgacagtttcaacgttcttggatgactatataactttattaatagcttttctaatttactcacgttatcctcacttaagtatataatataatatatcatttgtaactaaatttgcaactaagacaaattatacctaattcgctaaattcacgctactaaaaaagcgcttggaaaattccaaacgcttcttttgtttaatcatctagacctaacttcttaaagatatcatcaacatgacgcaaatgatagtgataatcaaatgcatcatcaatatcttccttggataggtaattcataatttcactgttttcaaccaatggcttaaactgcttttgctcattccatgatttagcagttagcttctgtaccatatcataagctttttcacgagatagacctgcttcatcgatcaacttaagcaacactcgttgagagtaaattaatccatatgtacgatccatattcttaagcatcgtttcagggaatacatctaagttagtcaaaattcgattgaagcggtgcaacatatagtcgacgccaatagtcgtatcaggcaagataactcgttcggcacttgaatgagaaatatcacgttcatgccataacgctacatcctcgtatgctgtaacgacatgtccacgcattactcgagccattccacagaggttttcagatccgatcgggttacgtttgtgtggcattgcagatgatcccttttggccagcgcggaaatgttcctcaacttcatgaatttcactgcgctgcaagccacgaatttctgtcgcccaattttcaatactagtagcaatcaatgctaatgtcgcaatgtattctgcatgcaaatcacgaggcaatacttgactagtaattggctgttgtgtcaaacctaattgcttcattacgctagtttcaactgcaggtggaacattagcaaaagtaccaacagcacccgaaattttgccagattcaacgccttttgcggcatgttcaaatcgttcaatatcacgattaatttctgcgtaccagcgagcaatcttgagaccaaatgtagttggttcagcctgaacgccatgtgtacgtcccatttctactgtgtacttatactttttagccttttctgcaatagttgcttttaattcgtgcagatcttttctgataatctcatcagcttgtttaagtaagtagccttgagcagtatcaaccacatcagttgaagtcaaaccaaagtgcacccattttttctcagggccaaggctttcagacacagttctagtaaaagcaaccacgtcatggtgggttacttgctcaagctcagccacacgctctgcagtaaagctggcattcttagcaatcttctccgcatctgcttctggcacttcaccgagttctgcccaagcctttgttgcggcaatttctacttcaagccaagctgcatatttattttcgtctgtccaaattttccccatttctgggcgagcataacgttcaagcataaattacatttcccatggattcttcaaaacaatagtttgttcacgatctggaccaactgaaacagttaccaaaggaacgccaaccaactctgaaacgcggttcaagaatttcttagcattttctggaagagcgtcccaagtcttaacttgagtaatatcttcatcccaagctggaagttcttcatatacaggcttacatctgtataattccttcaaacttgctggataataatcaatcttttcaccatcaagttcatatgcagtacaaatcttgatcttgtcaaaacctgaaaatacatcaagcaagttcaagctaaggccattgataccagcaacacgctttgagtgacgcaatgcaacggagtcaaaccaaccaacacgacgtggacgaccagtaacagtaccatattcatgagcagtttcacgaatacggtcaccaacttcatcaagcaattcagttgggaaaggacctgcaccaacacgagtagtgtaagccttgcagacaccaattacagtatcaagacgattagcacctataccaatacctgaacaaataccaccagaaatagtattagatgaggttacaaatggataagtaccttcatcaatatcaagcatcacaccttgcgcaccttcaaataaaactttcttattttggtcaagtgcatcattcactaagacagaagtatcagttacatacttcttcattctttgaccatattcatagtatttatcaaaaatgtcttcaaatttaagtgctggcttaccataaaccttagtaaataattcattctttacttcaaggttagcacgcaatttttcttcaaaggtgtctttttcaagcaaatcacaaacgcggattccaattcttgaagccttgtccatgtaagttggtccaataccattcttagtagtaccaatcttgttagcccccttagcttcttcttgatattcatcttgcttaatatcataaggcataatgatgtgggcacgattagaaattctcaagccactagtatcaatgccactcttttcaagattttctaattcgccaaacattacttctggattgattacgacaccattaccaataactgtattgtccttggctgcaaaaataccagaaggaattaaacgcatcttgaaagtttgaccattaatatcaatagtatgacctgcgttgttaccaccatttgaacgaactgcaactgcagcatccttactcaaaaagtcagtaatctttcccttaccttcatcgccccattggcttcctacgactgcgactgctgtcatttaaaattcacctcataaaaatctctataaatattacgtatgctagtctagcaattaatttacaaataatcaatataaaatccgaattattttatttttaaattatttcatagttcgatttttatattgacaaacacaaattattcccatatagtatgtctcggtcaacaaacaagattaaagggagcagttttaaaatgagtaactactttagtatggaagcctttgactatgatgatatccaacttgtacctaataagggtattatcaaaagccgtcgtgatgcagataccagtgtcaaattcggaaaccgaacatttaaaataccggttgttcctgccaatatggaaagtgtcattgatgataaccttgctatttggctagcccaaaacgattattattacgtaatgcatcgttttgaacccgaaaagaggatttccttcatcaaaatgatgcatcaaaaaggattattcgcatctatttcagttggcattaaagacagtgaatatgattttattgatgaattagtcaaggaaaaccttaaaccagaatatattactattgatgtagctcatggtcactccgtttacgtgattaagatgatcaagtatattaaggaaaaattacctgattcatttttaacagcgggcaatattgctacgccagaagccgtacgtgaactcgaaaatgcaggcgccgatgcaaccaaagttggtgtgggacctggtaaagcatgtattaccaaattgaagactggctttggtactggtggttggcaattagccgcattaagaatgtgcagtaaatctgcttctaagccattaattgccgacggtgggattcgtcataacggcgatatcgctaagtcaattcgttttggcgctaccatggttatgattggttcaatgctggccggtcatgaagaatcacctggtaatgtaatcaaaattaatggtaaaacttacaagcaatactggggctcagcctctgaggttcaaaaaggtgcttacaaaaatgtagaaggtaagcaaatgttagtgccataccgtggctcaattaaggatactttaaaagaaatgaaggaagacttgcagtcatccatctcatacgctggtggtcgcgatcttaattccattaagttagtcgactacgtaatcgttaaagacaatatttttgatggtgataagtaattttaataaaatttttgcatttttattattttcctgttaagaatattacgataatatagtattatctatcttttttcgatagaataatataagtcgagttattgtagggtagtcaataactcggctttttttgattattttttaaaaacgattggacagagttttaaattgtgttatactagttgtcgttgatgaatgcgcccttagcgcaactggatagagtgtctgactacgaatcagaaggttgaaggttcaaatccttcagggcgcacttaaaaacgggaaatggctcagtttggtagagcacctggtttgggaccagggggtcgcaggttcgaatcctgttttcccgataagttagccgcacttcattgaagtgcggtttttttgtgtaaaaaaataagtattccctcggaaatacttatcatgctatgcccctttagtagctcgtctaaagataatctgtgtatctgaatctacatatttcaataacggtaaatcgtaatccttaacctgggccaaaacatttactttctcattgcatggcaaatcgcgtttagtaatctcgatttcgccttcataacgcggatacaaatgattatcaatcgtcacgctgccagttggtctagcataaatattatcttgcggctctgttgacaaaaacatcttttttctgctttcctttaagcgaactacgtcacgcgccacatctggacgattatgccaatcattaccaaacaattctggtatatcagtatctaaatgcagtgtaattgcaccctgtttttgataattagtaatcgattcaattgcatccctcgtaagttgcggatctcccacaaaaatgtgatcgcaatcataatctttcaattctaagatcgcagctaatgggttttcatatcgctgcttctccaacgttggcaatcctgcaaaaattggtccacgcaatttgccatttcctgaaataaaggctgctgttttcaaaccatattgcttaagccactcattcttcttttgcatccagtgtgcatcaagacctgtttcaggacgtgggtagaagttatgtcctgctgttaatttttcaaaatttgcattgctataacgcagatcatcaatattttgttgcgtaataatgctggcatttagaactatcggcatttctttggacaacttggcaataatatcagtagaaaatccatgatctactctaagaccagttagactcaaacttttaatttgctcaacactattgacattaatacccaaatcttgcagatcatctgccgtgacatctgcaataattttcaagtctagtttttgacaccaattagttaagtccgccagccgatttaaaatcgtctcactatcagtatcaggtacagctagctgagtaaaaacgcaggtaaatccactattgcgcatcgtcagcaaataattgtaattctcggacgtcaaatcgtgtcctagataaacagaaaatcctaacattcttattcctctaaaattaattaatttcttttattatctatagcttaaacgctttcttaaatatcttactacattttttgcttgcttttttctaaaaaataatgttaaatacatataaacaaattaaaaagcgatgaaaaagacgagtaaataatctaattctttccagtgaattagtgctagtgtgaaactaatagaccctggattattgaaaaacacttttagcagctcactgaaacaataattcttagagtaggttgagacgtctccggtacgttaccacgccggtggagcatgatagtgcttcatgagtcggtctattaaaatatagacaatgtgggtggtaccgcggaaaaaagcctttcgtccctgtttttttagggagcgaagggctttttctttgctctaagtacattagaaagaggacttatattatgacacttattttacctaaagattatcacccaacattaactgtgcgcgacactgaagctgcgattgtatttattcgtgaaaccttccaagataaattggcagaaattctcggtttacaaagaatgtcagctccaatgtttgtcgaaaaaaagaccggcttaaacgacaacttaaatggtgttgagcgtcctgttgcctttgacatgaaggcaatgcctaaagaagatactatcgaagtagttcactcattggctaaatggaagagattggctttgaaacgctatggtttcggaatgcatgaaggactttacaccaacatgaacgccatccgccgggacgaagatcttgataacttccactccatctatgttgaccaatgggactgggaaaagattattagtaaacaagaacgcaacaccgacacacttgaagttactgtgatgaacatttttaaggcaattaaggcaactgaaaagctggttgctgcacgctacccaggctctacttatcgcctagctgatcacgtttcatttattactactcaagaattagaagatcgctggcctgatctttctccagaagagcgtgaagataagattgctaaagaagaaaaagccgtctttattatgaaaattggtgacaagttaaagcgtagtggtgaaccacacgatggccgtgcaccagactacgatgattggcaattaaacggtgacttagtcttctggtatgaaccgcttaacagtaagattgaaatctcttcaatggggatccgtgttagcgaagaaagtttgcgtgaacaattgaaaaaagctcactgtgaagaacgtgagaaattaccattccaccaaatgcttttgaagggtgaattaccttattcaatcggcggcggaatcggtcaatctcgtctctgtatgttgctgttaggtaaggctcacattggtgaagtacaagcttctatttggccagaagatatggttgaggcttgtgaagctgacgatattaagttgctgtaattttaagatttttttacataccaaaaaagatcctgcaaaatgtaggatcttttttctattgattttatttccgttctcttctagaaatccaagccataatcaatggcaacaatacaaagccaaagaccatcatcgcaatggcataccagttaacaccgataacttgccctgctgcgtttactacaccaaattgtgccttccagttatattcaactaacaagaagatcacaatcacaccagataaaattggcacaataacatcagtcataacgctcttattagcctttaagatatcttcttttgccttaccacggtaaaattgaataactgctagaggtaccacgatgaaacctaagaatctaaccatcgcgctcaaagtaatcaagttgaccatattgtattcaaaggccatcggaatcaaaattgccaagccaacagagataaagaaagttctaattgggaagttattcttagttctcttagttaaagcttgtgacatctgaccctcacgagccatagcttccagaatacgtggagcattaaagctggaagctacgttgatcccaaacattgaaaccaaggcaccaaccaagattacatcacgtaagatttcattattaaaaatagccgcaatcgctacaacttgcttagttgtcattaaagcacgtggattaagtaccatcgctaccgctacaacgccgatatagacaaccgcaataattaagattgccaatggaattgctcgtggcaagttcttttcagggttcttcatatcttctgaaccagaagctactgattcaaagccggtaaaggcatagaaggctgaaacaattgacatgacaaaggtagttgtagttaaagttggcacaattttctgaccattctgagtcaattgatctacttgccctaggttgcttgatgcaccagtagtaattaacaaaactactccagcaataataattaataccaatgcagccaacttaccgatagtagctaaattcattacatacttaactactttttgaccaaacaagttgatcacggtaataattgccatcaagatcaaaaagccaattgtgacatttattgccttattgggatttccgccaaaaattgaaatagttgacttaattaccccaacagccattacgccccaagctacactggctgagaagtaacgcagaactcccatataaaagccaatttttttaccaaaagcggccttggaataagcataggcagcaccagatttagtgacatactttgaagctgccgcaaacgaaatggccagaatcgctgcaaaaattgccgcaattaaatatacaactaaagctttactaccggcttgctgtaccacactaccaggtgttaaaaaaatacctgaaccaataatggcattaatcgctaacagcacaattgaccaaaagcctaatttatctcctgttttttcagtcatctatttgcttccttactttgcattatcaacaacaaacttaaataagttattcataaacgctacatcggaattacggtgcaacatttcagggtgccactgcacggcaatgacattaccttgtttattttctagcccttcaaccacaccatcaggagctgttgccactgcttttaaatctggtgcaacgtctttaattaattgatggtggaaagaattaacgcgaaattcagttttgcccaaaatttcagccaatttactatcagcttccacttccatactatgagtaggcaaagttggcgtatgaccttgcatgtgtttcaaagtaagttcttttctgtatgaaagatcttggtaaagcgtaccgccatgagccacattaataatttgagcaccacgacaaatgccaagtaccggaataccattttcttctgctaactttaacaagcgcatatcaaaatgatcgcgttcaggccaagtagcaccaatcttttgcattggctcctcaccataaaaacgtggatcaacatcatgcccaccagataagatcaagccttgaacatgattaagctgttcacgaatcacctcatcattttcagtaaatggaataatgtaaggcacaccgccattttgaactactgaatctacatagtcttcgttcacataactacgatggtatcctgggaaaattcctctatcgtcaataattacagaacctgagataccgataattggttttgtcatttatgctcctccttctgcttactttttgtatgtaatattatagagaaatttatgcaaaaagtacaattaaaaaattgcattgttgtctataatttttgcatatctttaaatatagtaaaaaacagcaagccttatttttagctcactgttttatgctatttataccaaattccaaaaaggatttccattacatgctaaatatgtttctagccactgtttaaaagagaaatcaaaatattgttcctctattccaggatacgttagataggactgtttttgattgtagcgatctaaattaatgcccatttctccctcgtctcttaaccaaagtataggtagataattaggtgttttaactaactgatttaagacatactcaatagtgtaaattctacaccttgctccacctaattcgatgccttgaaaagaatcaatgaataattctgcaccgttagcctgtatccaaaactctatcaaatcatttgggacagatatgcctgacaacctatttattttattttcagctactggcggatttaatttaaatttacagtaatagacgccaccaaaaccaaatattggtacgtcgacactgcattttttactaatcaaatttatattatctattatattatccattttaataattaataaaccatttagttataagcttatgtgcttcaattggtactggcattaagttgtcaaagtcattatttccaccataaattctaggtcttatatgatgaacttgattttcagcccaatactcttttgattgattgccataacgctcactaaactcttttatatagtaatatctatccatcgtagtccatactggtgaagaaggaagtctagaccaagtagtattgattggtgtttctgcatcttttttagagacaggatcaacatattcaggaaaattttgaccaattttattttgtaaataaatagaactaagtgaaattggataagtagcgctatttccattatagcctaccattccccatgctcctccaacagcaaaaaatgttgtagcagctggaaatacagcagaccctaacaaaccagtagtaatattgccttcttttacaattggactagctgtatttgtagtaattgggccggacaatgatggttcactatagaattgcaattgaactgaaattgcagcaggagctggaccagttattgaatcaatataaaaattgattttaaattgtccatctacatactcttgtgaagtatgaaatttaacaactgtatctggaatctctgccaaaaaagtatatgcagagtaatggctacttgttgcattaaaattattatgaatttttacagttccattttttaaaatagggacatctttttttacattttcattctttaacttatcttgagctaaagaatgaaaattttgttcattagctattttagcaacattcttatttacatcatttagcgagtcagcctttgcatttgtattgatagctataaagcacacgatagtggctaaaaaagcaaataactttctgtatttcatgtttctttcctcattatctataatttttaacacaattataaggatctttctattattctaccatacaactctatcacataagcaagtgctcccacactgtagcatcagatgctactgggatttacactctagattgatgtatacgaagaacacaattacaatcagaataacatgaaatactactatagcgacaatttaaaatatacagtaaaatctttaaactgtatttcttattctaacccttgttcaaagcgatactgccgtaatacatattccttgaaaaacggtaaagtaaaggccacttcaccataattagtagatttgataacttgatcatctaacaagcgtctacgatagttagcaacaaaattgcttggacggtttaacctttcatgaatttctttaattgaaacacaatgttttgggctctgagccatagctaaaacaaattttcggtcttgctttgacaaactactaagtactttggtataaacattttgctttagcaccaataagtactctgatttaatacattctaaagtgttttgatctattaccttactttttttagcagctttcaaaactaaataacctagcaactgaaaggcatatgaatagcccattgtcatcaacgccattttttcaagaatttttttcgacacttgataacctgattctttaaaaactttactatagctagcttcaacctgtgagagattcaatgctgataaagctattcgctttccacgtagtaagaatgaagttatattttcgtttttcaattcagagatattttcagaaagaccagctatcattaaggctataggataaccctgccgatttaataattgataacatcttgcaaaatctttcaactcctgacatagttttacttcgtctaaggtaatcaacactttaacgtcattttttcttacttcatcaaacatgttcgttaaaatatcttgatatgttaacttactaacgtctgtagaaagcgataatccaaaattagagaaatttagtccttcaatagatttaaatgatttttttagttttgaatctgcattcagatataagctattaataaaagaaggcaacaacttcatccccatggccaaattaacaacaatccaatctggatatgcactaatctttctgtccattgctgtcaaaaagacagttttgcctattccacgcattccataaacaatcgaaattgtatatgaactatttaaattctctattccttgagacacatcagcaattagtttttttcgctgcaaatacactgctggaattcggccaaagctaggattaaacggattatccatattttgtccccaatcattttcttatcaaaaaagcagcaggcttcttacctactactcaattttatttatctttttgatgcttaaccacataaatcagtgccgcaataatcaacactgctgcaccaaccgctactgaaatttgcgtctccggattaatgaacatgaagacaacaattactaccagcataatcaaagcaaagtaatttgaatatggataaagcggcaatttaaacgggtgattctccatcaagtgtggattctttcgtctaaagcgtaactctgctagcaggatcacaaaccaagctaccatccctggcaaaacagatgaactatagacaataacaaaaacattagccaatgatttattcaaaaattgggctaacacattaagcataaaaccaacgaaaattccactggtaattccaatgatcgcatgactaggcacgattctcttagatacgtgaccaaaagtcttaggtgcttcaccttcgtgtgccaatttatacaacattcgacttgatgaataaattcctgagtttgcaccggacaaagctgcagtcaaaactacaaagttaattactgaagctgccgcggtaattcccaccttggcaaaggtcgttacaaacggtgagccaatgctatctaatttattccatggataaattgtgacaatcacaaaaattgccccaacataaaagatcaaaatccgccacaatactgacttcacgcttttaacaatggccttatgcggatcagatacttcaccggctgaaatcccaattagctcaattccttcataagaaccaacaataatggccattgagaaaaagaagcccttgagaccaccagtgaagaagccgccatgactccacaggttagaaaagcctactggatgaccgccattaccaaagccaaatagaattaccgcaaagccaagtaaaatcattaagataatcgttacaaccttgatcatggcaaaccagaattccaaggttgcataagctttcgcactagctaagttagccaccagcaaaaataaaataataattacgccggcaacccaatcagaggtgcctttccaccaaaagcgcaaatactctgttgttgccaccacctcagaaattccgacaacaatgtattgaaacacgtttgcccattcggctaaatagccggcaattggatgcacatgctctgaagcatagtctgcaaaagaaccagtacctggatcaacataaagcatctcacctaatgcccgcattacgatatacaaaataaccccaacaaaaatataagctagcagtactgaaggaccggtccacttaatggttgagctagcccccatgaatagtccaacaccaattgctcctccaagtgagatcatttccatctgtccggctgtcatcgaccgctttaattcaggtgctttcttcgccatttccaactccctttctttagcatctgtaaaaatttcctaggaaatatatctattctcatttatctttaatcactataccttatcattttttcgaacaaaactgtagctgatcgctaaaaagattgcaaataaaatcgaaataatcaaagccagctgcgttgatttgataaagaataataagattaaaataccaatgtaaaaggcaagcgtaagccagctagttactgggtagcccggcattttaaagctgcctaaattctgcttattctgtttgcgataaacaatatgtgctgccataatcatgatccaaacaatcacaaaacaaatcgttgaaacagttgagacaacggagaatatttctgctggcattaaatagtttaaggcaactactacaaataaaattaatgaagaggtcatcaaagcgttcattggaattgcttttttggtcaattcacctagtcttttaggtgcatggccgttacgtgctaatgaataaagtgatcgactagttgaaaagattgcactattagtcgctgacatagctgcagtcaaaacgacaaaatttaaaatccctgcagccgctgtaacaccgatgccggtaaagacctggacaaagggacttgaagtagttgtaatgtgattccatggataaacagacataattgccaacattgagcccacataaaaaaggccgattctaactggcaaagtgttaattgccttaggaatatccttttgcggattagctgtttcactagcagtttgacctacaatttctaccccaacaaaggcaaaaacaaccatttgaaatgataaaagaaagccccaaatcccagttgggaaaaagccaccatgattaactaaattagttagtgaaacataaccgccctttacatgcgtatgaagtaacaacattacagcaccggtaatgattaagactacaattgccattaccttaatcattgagaaccaactttccagttcaccaaataatccgacatttaccatgttaatcaacatcaataagatcacaattactaaagggccaacccattgcggtagccacggaaaccagtatcttaaataaattcctgtcgcagtcaaatcagccatagctaaactaagccagcaagcccagtacatccagcccgctacaaattcggcacgcttacctaaatattttttgattgactctaaaaatgaatgactatcaggatcggctaaaataagctctcctaaagcacgcatcataaaaaaggtgataatccctacgattaagtacgacaaaataattgaagggccagcactatgaatggctgaaccagaacctaagaataggccagtaccaatggctccccctattgcaatcattgttacgtgacgactcttaagcccgcgttttaatctcggcttctcatccataattactcacaccttcctcaaaataaaaaatggagcggcatgttttttaaatgaaacatgttgctccatcaagtttgctttttttgaattatatagtcttacgcgtggtgctagttaaatcgttttagttaataaaaaagtccaatcttgttagactcaacttgtataataatagaaaagagcctgatctgattgaactgccttaagcttaagcgttttagccaccatttacaagttagttttaaagatttagtgataatttgtcggcactggtatcgtttgtatgcaccggctgagtttactcatcggcgaaatattgatcaaattaaaactacggacagtctgattttggctttacttatctggcaagctaagacaggaattgaatcacaaagaagattctgtgaatgtttcaattgtttatcacactcacgttttaatcgacgttcacgtcagctattgcaattgatttatcagatacggcaagaaatgaataaaaaggttgacctgaatggacatttcttgatcattgacagctttccggtacctgtttgccaaccaattcgcaactatcgtgctaaaatttttcgcggttatgccaacattggttataaggccaccaagaaaatttacttctatggtttcaaagttcatgccattgttagcgatgacggttacattcttgattatgtcgtaacaaaagcatcagttcatgatgccaaggagacagttgaactgctggaaaatgcccatccatctaattactatcttcttggcgacgaaggctatttaggcaaagaactgcatcaacagctaaaacaaatgggttatgaactttggacaccatatcgtaaaaatatgacaggagctaaaaagcacaatgatcatcaattgatggctattcgcagaacaattgaaagcgacttttcgcttctgacctattacaatgccgagaacaatcgagcacgtagtctgataggctttcaaagccggttggaaattgcaattttagcttataatttggcttattgtctagaaagatttaactagcaccacgcgtatagtcttataccaattcatgcaattattttttatctaaaaaagatattcccttaggaatatcttcattattagtaaactttaaattggttcaacggccagtaacgtactttaactacgccaacgatactactacgcttaatggttccgatataacggctatccttagaaacgctccggtgatcacccattacgaaatatgttcctttcggaatgcgcccagtatcctgcacatatttaatctgcgctctagtaaagtattgctggtaagtccgcgcccgcatcagtgactgcatagtaaaattctgagtctcagaataaaatgtatctgagccattatcaattaacttcgttccttgtttcaaccaaggttgagcaatctttttattattaatgtagatttgattatttttgctgacgattttttcaccaggcaaaccaataacacgcttaatgtacaaagcacctggttcatctggtgctttaacaatcactacttcaccacgcttgatttgcgcatgacgctcagcgattagccgatcaccattttgaaaagtaggttgcatcgaaagacctgatactgtatcgttgctcaagacgaagtggaaaagcagcagataggcaccgatcaaaataacccagataattaagatatctaggaaaaacttaccccatgattctttttcttcttttttctcagccattatttttctccatttatctttttccacagtttacaactttatggagaaattgccaaattacaaaaaagaggtatttcctcggaaatacctcttttattattaatgactattaattagtcttcttttttgtcttcagttttagcttcgtctgaaacttctaccgttacacccttcttagcaagaacatgagacatcttcttcaagtaaatgttaatgatcttgcccatgtcttgttcagtaagtgagttgaatggaacgattgcgtccaaacggttcaagaattcaggtctgaagtagttttcaagggctgagattaacttgtcttggtcaaccttgccatcttcaagcaacttgtctgagaagccggcgtttgaagtcataatcaagatagtatccttgaatgaaacagttctaccttgtgcgtcagtcaaacgaccgtcatccataatttgcaataatgcgttgaagacttgtgggttagccttttcaatttcatcaaataaaattaatgagtatggttggtgacgaaccttttcagttaattgaccaccttcaccgtagccaacatagccaggtgctgaaccgatcaacttgttaactgccatttcgtcttggtattcactcatgtccaaacggattaagtgttccttgttaccaaataattgaattgccaattgtttagcaagttcagtcttaccaacaccagtaggtccagtgagtaagaatgaaccagtaggtctgtcgctgtctttgaaaatttgcttacgagcaatagcgtcagtaattacatcgatagctctgtcttgatcaataacattcttcttaagtttcttagctaagtccaagttcttttgagcttcatcagcgtgaagttcactcattgggatcttagtcttttgttcaataattgcgtagatgtctttttcagttacttctggagtattcttagaatctacattcttaagttgtttctcaagttcagcaatcttactcttaatttctgaagccttgtcgtaatcctctgccttagcagcttcagtcttcttagcttcaagagctgagatttggttctttaagctcttttcatcagttgattgtacaagcaatgccttcttagcaccagcttcatccatcaagtcgatagccttgtctggtaagtaacggccttgaatgtatctttctgataattcaacagctaatttaagactgtcgtcactgtattttacgtggtggtagtcttcgtacttcttctttaagccttccaaaatcttaacagctacatcagtagatggttctggaacttgaacagcttggaatctacgtgataaagctggatctttttcaattctttggaattcactagtagtagtagcaccaattaacttcaattgaccacttgccaaagctggcttcaagatgttagctgcatccccattgttgttttctgaatcagtagaaccagcaccaacgatgttgtgaatttcatcgatgaataaaacaatgttaggatcgctcttggccttgtcgataaccttctttaatctttcttcaaagctaccacgaagacttgaaccagcaaccatgtcattaatatttactgaaatgatatgcatgttagccattttagctggtacattacctgaagcaattctttcagctaaaccttctacaatagaagtcttaccaacaccagcaggtccgattaaaacaggattattcttcttacgtcttgaaagaatttcaattacgttatcaatctgttcgtcacgaccaattactgggtcaaatttattgttcttagcttcctcaactaagtcaacaccaattggcttttcattgggttgttgtgggttctgttgaattgtttgtggtgcagcacccatgctgctggagtaattaattggaattgaacctgaactgcctttgctatttcttctgctaccaaagtcgtcattaaagaatgagctattcaattcgttaaataagttatcaaaatcattgtcaaagtatgccatatgtgcaacactccctatctcaaatttacgtctttagcactctagcttatcgagtgctaactcattacatttaatagtatagcaggttatccacagactgcaagctaaaaaacaaaagttttacacattttcctttatttttgtgatttttatttaaaaaagcactacaaatgctgcaatataaacatttgtagtgcttcacaaattataaagaatttcttaagatgggcaaaaattgatgattattttgcttaaaactgttgaattttaaggaagttttccacagataagaataagtttattaccataaactatttctgcctacctctattattgcccttttgcttgtccagtattttgcggttcgctcaactttctcggcccaagaaaatactgtttaattactttgattacctgcttattctgaggtaaatccgagtgatccgcttctacacccgttactgtcattgcagtatagctcttgacttgattctgaaaaatatattttccggctgctacgctagcttctggtacaattccatcagactcataattttttccaccagataaggaataaacaatcaagtttttcggtagtttatctttgttcttgataaagttttctagcatttgcgttttatgattaatatttttttcaccaaaattatatggcgttcctagcgtcatcagacgtttgattttaatttcatcagaatagtaacagtagtaatgttctaaccaataggtccagatcaagccaccgttagaatgcccaaaggctttaaaattattaaacttatagctctctgataaggcataaaaggcttgatcaaaccagctggcttgcttcttaatattgctataaccatcgtgattattttcaaaaccgacaataatgaaaggttcgttgtcgtttttattaattttgcctgaatatgacagcgttccattcgttgaaactttaattttaagcacgctatgcttagtcggtgtgttctgatttagctgcttcactaattggttaaaacgttcagtcgttgcactagaacctggaatcataattactggtgacaaaagcgatttgcgtctttcagctctagcgtggttatcagccttcatccaagaataacccggaatagccaaagctactaataagactaagacgattgccaaccatttaaaattaggattttgaactaaattaatcatttttttcttcataatcctttagtcccctttcaagtcgcaaacctaatttcatagttggaataaacattattatatccaaaatgaataacaaaatagaaaataccaagttgctccaatcaccattggaaccaaagaaagagaccaaaattcctggtgtcccacttaaaacggggtaagcacaaggttgaattaaatggcaaaaaattgctccagcggctagtagaatattaataattggaataatcacaatcgccggcagtaacaatggatttaaaataatcggcatcccgaccatcatgcctccagttgagcccaaagctgctggaagcaggttaaccttggcaatattttcactatccttatttttactataaattaggataattacaatcatcgctaaaacaatactcgcaccacccatttctgcataaggataaaacaaagaactacccaaatacttatatggtacattccaagcactcccatgttttaaggcaaaatttaagttagctgctgctgaaatactattagaagtagttgacaaagaagctagaggataacctattcccatccagctaagtaaaaagactgggatagtcagtaaagctattaacaaaatattatttgattcctgtatttgagtaactaggcctttaaaagtactagaattcaagaatttgatttgaaattcataaattataatccccagaactatcccacaaaaaattgcaaatattgtcgggataaacgcattccaggctctttccttaattctagcggcatgttcaaaatcgactggcttgtgttcctttcctagccaatgaaaaatttgccctacaccatagccaattaacaaggccagcaagacagcattaatttttaaaacactggaagaaaatggtgaatgatcgctggcattattagctaaattattggcataagcacaaaacatgataacgatgacagccgtcatcccggccatggttgaatctttacggtataaacgcgcagtataacgtgccgcaaaataagccgcataaataccaaataagccgaaggttacccgaaccatcccccgactgacaaatgctcccgcataccaaaaacgatctggcaaagtgatatcaaaattaaaaatattgtaaataaaactatcgggcgaaaaaacggcatctctgaacaacttaaaatatgccccaattaccgcgatcggcatcagcataaccaacgttcgctgaaaaattctaaagattgccaatcttcttagtttaagaaagatatttgtgattctgtttaccatggtattttcctttacctatctattctaaatatgattgaataaagttaattaaaacaattattaattatacatctatactagaaagctgattatgatggcttacattaacttaaaaaataatactaaaatttaccaatctggtgacacaaccatctatgccaataagaacattactttttctatcgataaaggagaactagtcattattctcggctcatcaggagctgggaaatctactttgcttaatattttaggcggaatggaaccaaatacaagtggcgatgtaattgtagcgggaaaaaatattgcaaaatataacgctaaagaattaactacctatcggcgcaacgacgttggctttgtttttcaattttataatttgattcccaacttaacagcaaaagaaaacgttgaattagctgctcaaattgtccctgatgcgatgagcgccgatgatgccttgcagtatgttgacctagggcagcgagaaaacaattttcccgctcaactatcaggcggtgagcagcaacgtgtggcaattgcccgagccatcgctaaaaagccagccttacttttgtgcgatgagcccaccggtgcccttgactataaaacaggcaaacgaatcttaaaaattttgcaaaatatgagccggcaaaatggctcgacggtcttgattgtaactcataacgccgctattgccccaattgctgataaggtcatccgtattcacgatggaagtattcaaaaagtccagcataatctacatcccgctgatattagtacaattgaatggtaggtgggcgacatgcaaaaaactattctatggaaagatgcttggcaagcaatcacccattcacttgaccgttacattgccattattctattaattgcactggggacttttgcctttacaggtttaaaaatggctggtcctgatatgcgagcaacaggggcagaattttttgccaaacataacttagctgacgtcactgtcacttcaaactatggcattaattcaactgatcgccttactattcagaatttaccggaagtaaaagaagctacttttggctattttcaagatgttaaaattaaaaatcaacctgatacgctccgcatcttttctcaatcagataatctttcaagttatgaattgattaaaggtcattttcctaagaataaaacagagattgcactgtcatatttattgcagaaaaaatatcgcttggggcaaaacattacttttaataaacctggcattttaaaaaataagacttacaagattgttggcttcgtcaaagctagtgagttcttagataaaaatccaatcggtcaaaccaacattggcagtggccatttaactggaattgcggttgctaatcataacgccttcgccgcaccagtttatcaaattgcccgaatcattttcaaaaataccgccaatttaagtccctttggcatagcttaccgcaaccgtgtttataacgatcaaaccaaattgcaaactgctttaaaccaaaatcgagccgacaaatatgacaaatatcgggccatgtatcaaaagcaatatcgacaagctgcagctaaacaattacttaaacgtggcatcgtagttaacccggcgcaaatcaaagtaccacagaacaagcttaaaattgcttatcctaactacgtaatcaacagccgtgaagaaagtcagggttatgcttcttatcgagcagattctgaacgagttgaagttttggctaatgtctttcctgttttcttgtttgctgtagcggctttggtcagcttaactacaatgatgcgttttgttgaagaagaacggactaatattggtacgctaaaagcactaggctatggtaatggagcaattgccattaagttcttgctctatagcacctcagctgcaattttaggtgttattctgggggctagcttaggttacacctttttgcctaacttaatcatcaaggcctatttagctagctcaaccttaggaactgattaccagctgaattttgcttggggaccactattaatttcattgacgattgcactacttgcaacaaccgtcgtttcaatgattactttagctcaaactctgcgtgaacagccttcagctttacttttacctaaaccacctaaaaatggttcacgtattttactagaatatattccatttttatggaagcacatgagcttttcagctaaggtaacagcccgcaatattttccgttataagagcagaatgctgatgaccatcctaggcgttgctggttgtactggattactagtaatgggatttggtattcgtgattcactacacggaattggcaatattcaatattctgaagtacaaaaaaatgatgtcatcgctttgaaaaaccgccatgttaacacgactgagcgacaaaaattaaacaaaatttttaccagccatgatgttacgcaaactactgctgtacaatatcaacaattgactaaacaccttgatagcactggagcaactgaaaatgtaatgctaattgcgccacaatcaactaaaaactttagcaaatctatcaatttgcaagaacgtcaaagcaagaaaaaacttgttttgtcaaataatggtgtagtcatttcagaaaaattagctactatcttgcacgctcataaaggttcaacaatttccttaaaaaatgaacatgggaaactacttaagttcaaagttagtggaatctgcgaaatgtatctcggtcactatatctttatgagcccagctgaatatgccaaagaaactggcaaaaaatttactactaatgcctatttagtaaccatggccaaacattccccaggaaatatcagccatattagtcaaaaaatgatcaaaacaggcgcaatcgaaacggttgtctcaacttcatcaaatagaaaattgctgagcagtttcactggtagtctaaatgaagtcattctaatcctaattttaatttcagggatgttggccttagtagtcatctataacttaactaatatcaatgtcgctgaaagaattcgcgaattatcgaccatcaaagtgctaggattttacgataatgaaacaacgatgtacatttatcgcgaaacaatcatcttatcggcactaggaattatcgtaggctttggctttggttggtggctacaccactttattatcactagtttgccaccagatgtcgcgatgttcgatccgaatatgtacccgttgaacttcgtcttctctgcgctaattcccgctattatcaccgctattttagcaattgttgtccatcacaagatcaagcgaatcaacatactagatgccttgtcctccattgattaagcgctgttatgctataataatcactatagaaaagggtggaaaaaacatgccaagaaagcactttgaattaaacagtgatgttaataaattaatcgaaaaatatgatgaaattaataatgttgatttcaataagttagttaacaaggccttaagattctaccttgttaatcaaatgaactacaaagatgttcaagacgccctgaataaagctgataacgaagcttctaagtatattgatgaagcaatgcgttccagcatgggtgatattaatcgaaattattagaacataactaatcatggaaaaagccatctgttttgacagcaatgtcattaagttaagacattgacaattaatattagacttttaaagcactgatttaacatttaattggttaaattggtgcttttttcgtacaacaaataaggcatagcacagattctgcttttttaagctacgcgatataaataatatacagctgatttgggcttaatatttctcttgtccttgcggcctggtctaattggaatggtataatagctgatctgaataaggatccgttcaaaatcttgcgttaaagaagaagccaaatacatgctctgaataatcaagcatgattgcttgaaattgatggcatattgatacttgcaatgcttttgcggaatataggcctgtgcatcaatttgactgattgcattaaacataatcatatgggcataaatttccatttcaataaatttatcttgtttggaatggaactgtacactgcctaaagaatacttcaatttcttgaaggaggtctcaataccccaacgcagatgataaagctctttaattctttttagcggataattttttcgatcaagattggttagcacaacttcccattcttctttgcctgatttggcatcattaattctaaatttgcaggctcgaaattttattgtgcataactcgccaaaatcccagcttagatcctgggtatttttagagcgatacttaatatattggcgataatgatgctggacatggtgaatattctcactggctttatgcgtgatgtagtaatagttagaagtagttaccaggcaggaaatctcacgatcacattcttgatcaggcaatgtcgttatttctttaactccgccttgtccagccttagttcgtattatgtaatgacagttaggcaggcgattgcagttttcaatcatattgaaactagtgtagccacgatccattgttacaatatatggaccacaattcaaagctttaagcatttgaacagccgctttgcgttcatccatttctgatttaggctgaaaaatacaatcctggtaggtattattcaatagatcatataaggcattaacgtgaatttgacaatagggtttctttttatgagaagaagcttgtacaatgttattcgatttcggattccagatttgattaaagtcagagccatcaatggcaaacaaacggtagtgatgatcaaaaagttgaatattaaatagattttgattaaaaacagtcagaatatgtttaaaacaagcaggagaaagctggcttttgcgttgaacataggcagaagtactaactactttatcgttctttttagttgcatcttcgccaaaagctctaaagagttcactgtttaaattctgaccttgcatgttaattgtagttttaaggactgtcgctgcatctaaagtgcgtttcctggtaaaagcatgaggattattaataaaatcgtgaatatgatccccagtattattgataatttgatcaagacgttctagaatattcttatgaagggctttcataattaacaccatctttctggcaataattttgaaggtttaaaatatataatatataagataggcgaaaaggctggtcttttcgcctttattttatacaaaaaaagagatcgaatccaaatgattcgatctctaaaaaagcacccttaattgtcaatgtcttaacttaatgacattggttttgacagcaggtggcttttagtattcattacaagataatttattataaaaacaactaattgataatttctttactcaaaatgcttataccgataatatcgataacctatctttttaccaaaaatcgtctccgaagttttcatccaattagccagcaaaacataaatgcctaaaaagactaaaccgaagattgctaaataaccaaaactaccaacacggcctaagtcgttgaaacgatagccaaataaaatttggtaaacaaagagcaggataatgtaaatctcgtttgaaacaatgatcggcaacaaactccccatcttaacgccatatgtcttattaagcttgtgataactgagccaaattaccagtaagaatgaaatatcagttgaaagaattgcaccatccccattcatgaacatagtcatcggtacttgcaaaattatttttactaagacaccttcaaccatatagatcacagccagtttgttcatgttcaaagctaaaagcagtgttaatgaattcatcaccaaaccagcaaacaaactttgaacaatattttcaaccaaataatacgcacctaaactatcgtgtgagaacaagaccgtataaattggagaagccgcaaaagcaccaagtgcaacaaccggaagcaagacaaataatagtagtctatagttctctaaaagcagctttctaatgctttcttgactatcattagccttatacttaagccctgctaaaagcggcagactagtctcagaaacggctgtcgcaagtgaaataatcaccgtggtaatcttgcttggattagccgagaaaattgtgtacaagtaactaacatagcttttactcatatgactgaagctaatcaggatttgtttaaacaaaagttgatcaactaattgcgtaacagtaatgaacgatcccagcaaaacaaacggaattgaggcataccataagttaagcaaactacgagaaacattattaagtgctctgggctcgctattttcaattaattctcggtaatgtccccactgcttgcgcatatatgcaaaaagatacaggtaactagctatagcaccaacacaggcgccaaacacactgaaataaaccgccgttacgtaatcatgatggaagacttcaataatcaacaaagtagccagcaaaataaacaaaattcgagcaaattgttcccataattgggaaatcccatatggcttcatatcattatttccctgaaaccaacctcgaaccatactcattgatggcagaattactacggctggcactaatactcgaatagaaattgttgcactagccactgaatccactggactatttttggcaatcattggtgccgtcacataaagcaaaataccacacgctattcccatgaccagcataatagcgaagcctaatttggtaatgtacaaactgtctttatatctattttgcgaatttaattgcgatacttcccgggcaataactgaaggaagtcctgccgtcccaattgataaaaacagcgcatacggcgtatatgacgaattgaacagcgcctgtgcgtttaattggttgtggtagcttcccagcataattagccaaggaatcaaataaacaaccccgagaattctagatacaatgctaccaaacgatagccaaaatgaaccggataggatttttttattcaatagaatagcctcaaatctacgttagtttctcattgtgccttcttattatacgtggattttataactttgtgggaaatatgtaccaactagttacccttttttaacaaatttttcggctctaataatacaaatcagttacattatttactatattgttacccagcctttaattttacgttagaccccttgacctaaccttctttaattattatccttaaaatgtttctgttaaaggtcataattagacaaaaataataatgtattaagaatattcatcgggggaattaagttgtcattcaagaaaaagattatcactaaattagcttatgttgctatgctttcaactactggcgttgccgcagctgcaatcgtgcaaccacaagcacatgttcaagcttctaccacttcagttgctgctcgctcactcggaatcgatgttgctagttaccaaagtgctgatctttcagctcacgctaaaagcggtgctaagtttgctgttgttaaagtaagtgaaggtaccagctacagaaatcctaaggctagtgctcaaatcgctagtgcccgcgctaagaatatgatgccaatgggctaccactttgctacattttctgctaatagcgctgctgctaaaaatgaagccaactacgcaatcgcatcagctaaggctgttggtcttggtgctggctcataccttgcatgtgactatgagtcaggtgacggcaacaatatctatggtggtaagaatcctactgctaatgcaattaatgccttcatgagcaaggttaaagctgctggttacaagccacttctttacgctagttcatcagttttaagaaacaacattaacactaactctgttgttaacaaattccctaactcattatgggttgctgcatacgctgtttcaggtcgagtagacaatcctaactttgactacttcccatcaatgaagggtgtttcaatttggcaatttactgacaactggcgtggtcttaacgttgacggtaacattaacgttttacctcttacttcatcaggtagcgctgtttctcaagcacctaagaaggctcgcgtattaaagaagaaggctcatgtatataacaaggctggtcaccgtacaggcaagactattaagaagggcacttctatcactacccatggcaagaagaaaactatcaatggtaagaaatactacaagattgccaagaatcaatacattagatcagctaacctttactaaaaaggcaaaataagtcatcaaaaaatgcaccaggtagaaattacctgatgcattttattttatccaattttttacttggcgaattgttcaccagctaagttacggtagaagttagccttagcttgacggtaatatgggttaacccacaataaaccgatcccgcaggaaataataccaagtagccaccagccgatgaaacttaaatcaaaaataaacaagtccatcttatggccatccatcaacttacggctggcactgatagcttctgtggcagtcggctcatgaccactatctagcatgtcacgcaagatatatggtgtcactgcatatgaataagccttgatcagccctggaataatcagtaaccaagtccacaaaataagaaaaatttcatataaaatataagttaaaaagttactcttaaagtttctggtaaatggactaaagatacctgaaagaacattttccttagtaccactatctctaaaatgcaagatagtataaattacgccccatgtgattaagccaattgcaactgaaactaccaaagtaatcagccatgcaaaaggattaactcttactttatctaggtacatcaattcagcattgttaccgaagcggcggacaataccgtacacgatatcttcgcccttttcaaaaaagttttcgatatcggtcaaaatataaacgattagccagccaacaaatgacagcaaaactgcccagccccagttaccacgtaactggtctctagcttgttcttttaattcttttcttgtagtagccattttctctcctcctcacttttctaatcatgagtattgtcgcctaaaatcagggcagaatcaattaaaagcacatcaaaaaagcctaattccaccaacatcggaactaggctcacacagtgttgaccgccactctgaccacatatagaagataacattttcgctaccggagaaaatgactactaatagcgacggtacatgatagattttagcattcaactacctaaaagacaagcgaaaagacgtgttgaattagcggaatggataccaaaatttacggataaaaaagacgaggtctaaacctcgtcttcttcattactaaaattcaagcatcatcgtcattgcacgattgatcttctttttaatctttttaaactcaccagaagcagtatgattatcctgcaaaatgatcatgttctggccatctttagttgcccgcataaaggtataatacccttcaccagcaccattagcagctttataatgctttaaattataaagtccaccattataatagctaggagcctgacccttgaacagaacttttctactcttgttagtcaaaatcttaccagcaagaatatactgcatggtcttagctaaatctgcgttagacattacgattgaaccagcacccagctcattgtgagcatccttaacggctttagcatggttcactttgacatattcaccctcacgcatttcatagcctggtacccaatgactagccaataacttagccttgtctgaccacaagaactcactatgggttagcttcagtggcttgatatatgtgtcatggaacaattgctcgtatgactttttctcaagcttggacaagattccacaaaggaaaatatagtttactgaagtatagtgccacttacctaatttgctagcatcaaacacagtatattgtgcatcatgcttgatgttcgcttcatcagagataaactcaggcgtacctaattgttgaccagctttcaaatccagccctgatgtcatatcaattaagttgctaatcttgactgaactagcaccatctacatttgggtagaattttgaaagtttatcgctaagcttcaactttcctttctctacctcatgcatcaccattgcagctgtcattgacttttgaactgaattgatcaaatagctagtgtcaggtttattgtccgtcgcataattaagcaaaactttgccatgatttattactaaaactgagcctttaacgcccacatggtcaatagcctggcgcactattccgcttttaaacggtctttattgcttaaatcaactcgtttaacgttatccttgttttgccacttcttggagtagaagtagttagacatatcatagtcataacgcttattaggttccttcatgaatggacgaacagcttgatcaactgcaacccagcctttccagcctaggtgaatagtatcttgcataaagtacttttcattgcctcgtcttgaaagatctgcaatattttcaaagccttgactggttaactggtgttccatcttagcaacagactcttggtacatcttgctagataaaccagtgtacttcatccacttgccattaattggtgggatgataaatagcacattagtgtgttgcttagcaaactgctccaacatcaattggagatcaccatattctactgaatgtacatagtcaaaatcacgctgactacccttcaagcgtttcaataccttctttggtaaacgtgttctaaagaaggtattatcaatacctaagttgtttgagttagtgtgtatagcagcttgctctgctgcaaccttattcaaagcagctacagaatacttgttaggtaaaaccttagctctcttttgaatcttatttacacgatcacgcaattggaatgagctgaagaaattatcttcgttacgcaacattcgacgacgattttgtaaataaaatttttggaagctagtcaacttcttgccttgagcaatttgcttaaggctattcttgatctcgccctttacatttggcatttccaacagacgtttagctgcataacgatcagttttattattcttggcactaagcaagaaattacatgcttgcaatggtgaataatacaatgcaaaggcattaggatcttgaccccgcttagtaaaccattgtggtgaaatgatcacaacagccttcttgtttctaagctgcttagctgttccttgcatccccaagaactgagccaaagattgactacccggtccacctaataagaatggacggtagtttctatgatacttttccgcaattacactagggtgaagtgggtcgaatcttgacaactcacttgaaccatagaatggcacgtagccatcttcaaaagcttcctgcttcattgtgctgcccttgaagacagttgtgttttgtgaagctgcagcctcgtaaatcgtttgcttagaaaaagttctttcccaaggaataaggaaaacaactaacaaaaggataaaagcgcaaagaactgggccaaagatttgccacagccggcgtttattactcattttctaagctttccacctttgccacaatcttgtttggagtgtcccattcttcacggttaaattctgaaacaggaacatcaatatcaaacttttcttgcaagttcaaaagcatttgtacacttgccattgagtccatcaaaccattgtcaaagatgttttcatccatttggtctgataaatcttcaccagttaagtcatttaaaatatctaatacgccttgttttgtatccataattaatacctctcaaaaaacaactcaatacttattctacttccagccgaaccacagttgacttaggaaccctgagaaaatcaagaaactgaaacatactacattgaaggttaagaaaatggcgaaccatttagtaaacttgttagatggaatttgcttcttatgctttctcttgaatctaagccacatatcgttgatacaaatagctgaagcatggaagataccataaacaatataataccacgttaagccatgccagaaacccatgattaagaacaacaggaagtaagaaacttgtgataatctaattcgattcttaaacattttcttcttcattgcaaagaaagtgaatcgcatgtagatgtaatcacggaaccagaatgataaagtaatgtgccaacggttccaaaaatccttaatgttcttagaaataaatggcttgttaaagttcattggtgtatgaattcccataaagtatgagattgatacagcaaacaatgagtaacctgcaaagtcaaagaacaggtacatactgtggcaatacatgtaagctacaagccaccatgatagcttcaagccgccatttgcattaccaacggctaaagcagcagcactgatctttggtaacaaataagtgccaaagaaccaaccaatcacaaatttgtataaaaagccttggaataagtatctaacagcatactgcatatctgtaatgtatgcatcacgcgtaggtaccttatcataatcttttttaaatctgcggtaacgatcaataggacctgacgaaatagttgggaagaaaagcaagaatcttgcgtaagtaacaggatctactttcttaattgccccatcacgcatttccataataacttgtactgtcttaaaggttacgtatgagattcccaagaaaccaatgacaaagccaattgagttatcaggaaaagcggtcaaatatttaactgcggctaatggaataattgccaaaatcacagccaaactaaagatccaagtcttatttttaccgtggtgacgataatactgataagcaaaggttaaggcaaattcgtaaaccaaccagattaataggttaaccccttgctcccagtgatcaccatcaaaaatcaagaacaagaaaacaattgaaaaaattgcttcatatgtcttgagtcgatgaccgtaatatagcccaatgataattggaattaaagcgatcatcaaatagatgaaatattgcggattagaataaggctgtaagttaatgaaattaaaattcactacttattaacctccttaattaccgccttaatatctaccttaccattttgtgaaataggtaatgcatcttggtagatgtaacgctgtggaatcatgtaaggcattatattcttagctaagtcttcacgaatcatcttagttaaagcagcttcagaatactgacgacgaacgccttcttttaattcgatttcggcaacgatctgcttaacagtgtggtccttattgtacttaggagcagcaacgccataacggacaagcttgttcttagttaagtagaaattgatttcttcaagttcgattctgtaaccattgaacttgatttggaagtcaattcgaccgcgataaaatagcatatcgccatcaaagaaaccagcatccccactccggtagctacgatactcagcaccatcttcatggaaaaaggcagcttcggtcttttcaggattgttcatatatcctttagaaacactaggaccactaatgataatttcaccttcgccaggcttatcacccttagaagtatcaattgtaatcttagtgtcttcttttaccttaccgattggcaaacggtcatactttttaagaacttcatcagtaatttcaacttgagtaacagcaactgttgtttcagttggaccataggtgttgaaaatatgactatctgggaacttcttcttaagcatctcagcttcactgtgtggcaattcttcaccacagaacaagaaatgacttaagtctggatggtgttctgcatcaaaagtcttgtccaagaagcacatctgtgcaaatgacggagttgatacccaaacattgaactgcatctttggcaaagtttggaataatttaccaaagttttgagtaacatcatgaggcaaaactaccaacttaccagcagaaacaagtgctggataaagactcattactgacaaatcaaatgagtaaggtgcttgtgccaagaaacttggatgttctggcaaattaaagtctgacaactcccagttaacgaaactaagcaaattgtcgtgactaatttgtacacccttaggtttaccagttgtacctgaagtaaagataatgtagtagttctcatcaccttcaacgaagttcttctcgtcaacttcaaaattgtcgtcttcaacttcgctagccttaagaaccttaacatcagttaaatcaacttctggtaacggatcaatttccaaaactagtggtgacttagaaacgtcttgaatcatcgttaaacgttctgcgttagaatagctagcaattggaatataagcgtgacctgacttaacacaaccaagaaaactagcaatcatttcaaaagtttgtccgccccaaatcataattggagcatgctctggaatatctaagctagcaattttatgtgcccacgcatttgaacgctttttaaggtcaccatatgtattagtttcaccgagatagtcgtaaacaacacgatctggttcgtttgcggcgatctcatcaattttcttaataacatcttgaatcatgtgatagcacctaccttaaaattcattataaatgaagtgaacagatgttagtccactatattcatataaatagataagagccatcaggattccgaaataaacaattgttttcaaaacaaacataccaatacgtctgcctcgagaatcaaccttcgtctttttattcattttttctcctttaggtaatcttacttttgcctttgccctatattactacaaatagtggcaacaaacgcactaacggcttatattttaacaaatttaaactttttcttaaatcttcagttatttgtttcaaattgcgaatgcgttttctttactgttgtctcttgcaatcccgataagcaaaaaataatggaataaagataactattgccacaaaaatcaaagcaaagatcattaagcgccatacattctgtggtttagtccacattttactctttgccgtcgccaacaaaaatgccgcaaataaagcaataacaattacttcaaccaggcaaaaaattaaatgagtattttgccagagatataagtaggttgttgccggaaataaacaaaaccaccctgaaaagcgtaaaagaaagatttcttttttacgataatctactttcattatagtttcctttcctcattaactgccaaataacgcattaatattcaccgacaaaatccggtccataactacaatttctggtctggcgtagatcttagagcctgattcaaacacacatagtagttgtcccttataagcggtaatttgctctaaatatggcggcatggtaattaccagttctgcattcttttcgtctaaagcatttaaagctgaagttggaaaaacgtagagcttggaatcaccactaccataagattggctcaaaaaaattttattttggtaaattgcaattccttgaatttgcttatccattgaagtttcgccagttggatcggaccattgcagcgttccggtaacagatttaacttcattattagtaattgagccacgatttttaccactacgcgctatagtgtaagccgcaacttttcctcgaccatacatgttaaaaaagccaacaaacaattgaccatcataatatgtaacggtcgatgctttttcaactgcaggaatggcaatttgatatttatacttaattggtatttggctgccctctttataggcccttaattctgccattgaaaatgctgctagcgctgaagatttgcccattgagccagttatccagatatttttggctactggatcataagcaatcccacctaggtgtggccgaccaggtatttgaatcgttttaagatatttgcctgtcttcttatctaagacataaacaaccgaagcatgctcatgttcaccatcataagcagttagcaaaatatacttacctgcaaccgtaatcccctgtggtgtcattgcagttgctgtattgacctttttagttttaaaatcataacttttagtagcaactaatcccggcaaaacaaagtcttttccatcccacgtccgcggtggtacataattggcaactttattaataaaaggatatttttcacgcaatgctttttggtaattggcaaaattatgccaagcaggactagtgcttgtcccatccttagcaattttttcttttggccgttgacggatcatctcctgcttctgccaccattggtaaccgaaatagcctcctgcaccaatccctgcaagcaaaagcagtactagcaggaagcgcaaaattcttttaccaatttttttcaaaaaattactcccttctgtttaggaattgtccctattatgcaattcattataacgaaaaaacaattactttttgtttttaactccttgctataagctttatttactaaaaagataaatttttttgcaaaaaagtgctttcgtcacacttttttcacaaattaaggttatactagtaaatgtagtgaggaagaataatcctctactacaactcaacttttttgtttttcattcatactcctccaagtaaataatgaaaataaaaagaattgacttactccaattagtcaatttcatatctatccctttcggctcacgtgcgttgcgtgagcttttcttataccttaacttattctcaagcaaatctttaccttttcataataaattgaacacttttacttcacatttacccagtattatataaaccgtagcaagatggtagaaacttgctacaatactcccacttttttatttcattcttactcctccaaagtagatgaaactaatagtgtctgggaaaaaactaagtctcagatcatgaaaaaagaacgttgaatttttgtttcaacgctctttttgtatacttttagctccagccttgatattattaaatcatcacaaaataaaaaaggtggaaactaacatgtacaagaattatatcacaggtcaaactgctttaacacttaatctagattttgccattccggccaatcatttggctaatgtcatcagctggtttgtagattcaattccagaagatgttttagtaggcaagactgctaaaacgggccgcccagcctatcatccagccatgatgctcaaaatactgctttttgcttactccagaagagttttttctggcagaaagattgagttgatgctggaagaaaatctgccaatgatgatcttggctgaccagcaaaagatttcatatcatactatcaataattttagatcaagcagccatgccaatgaactgattaaaaagagctttatctacttcactaacctgttagaagatgaaggcttaatcaatgaaggtgctgcttttatcgatggtactaagattgaagctgatgctaaccgctatacatttgtctggcgcaaagcggttgaaaagtatcatgaaaagctgaaaggccaggcagttgaactttatgatgaattgattactaaagaagtagtcaaagaaatggaaaaagaaaaagttcaaactagtcaggggctaaaggaattagctcaagaaactgaagcagaaattaacaagctgactaaagagattgagcaggaaaacaaagccattcctggcggttcacctcgaaaagccaagcgacgtggactaaaaaagattctgcaccggctaagaaaagattatgtgccaagaatgcaaaaatatgaagaagccgaagagatctttgccggacgcaacagttattccaaaacagatcatgacgccacctttatgcatatgaaggaagaccacatgaaaaatggtcaattaaagcctggctacaatattcaagcagtcacgaccgatcaatatgtagttgattatgccatctttcctaatccgacagatttcaaaactttggagccggttttggatcaaatgaccgtgttggacaagtttgacaaaatcgtcgccgatgctggctatggcagtgaatacaattattcgatgctggaggaaaaatatccagacaagaagtactttattccctacactatgtatgaaaaagaacagaccaaaaagtataagaatgatccaactaagctaatcaactggtactacaatgaaaaagatgattattacattgatcatcatggcgtcagattcaatttcaaatattacagccagcgcaaggatcgttctactggtcaggtccgtgattttaaggtttatgaggcagacgagttccagctaacgccagaattggaacaattggctaaaacagctagcggccgccagcgccaagttcgctataatcctaactggcaatatttaaaagaaaaagcaaaagaagttctccaaagcgaagaaggcagacacatctatggcatgagaaaatatgatgtagagccagttttcggacatttgaagaacgtatttggcatgcgcagaacgcacctgcgaggtaaagagaaggtcgaaaccgatatcggaattgcctttatgatgatgaatttgaacaaatattgtcaaagaaggtggctgaagggccgatttttattgttaaaaattttaaagagaacaaaaaaacgatcaagattcttaaaaaaggaaatcttgatcgtttttattcatctggaagctatttttttcccagacactttcctttttcagcacttttttctgtataattaaggtagaaatgaggtgccgctatgttttcaccatcaatcaaacatttaatagaagaaaaatctggttcatttttaatccctgctagccgaattgcctttgtccaagcagacaatcctctttatcatgcctttttgattttgactaaggttaaatattcaaaaattccagttttagataaagaaaaacgagtcgttggcctgcttagtttggaaatgattacggacaagatgctgacgactgatgagatctccactgcccctttagataaattaaaggtcgaagatgtaatgcaaactaagtttgataaaataaacttcgttgaaaccaccctagaaacgcaactgcatctgttaatcaataatgctttcttgcccgttgttgatgatcgcggcgtgtttcagggactacttactagacgcgaatggattaaggcatttaactatgtagttcacacttatgacaaacactacgaaacaaaacgaataaaataacctccaagcagcctttaaggctgctttttttaactccaacatttattgagcaaaaatgtgtccagaccaataaagaatgttagaattaagcggtagacagatatgtttgtattttggggagggcaattatgaaaaatttaaaacgtcaatggaagtttattgtcgttttgattgctggtgcagttggattaattagccaatttgcattgcattcaaagagcctattctcaatcgggaatcttcaatttccagttcatgccatcattattgatatcattggtatcttgatggcaatttctttactattggaaattttccacgattggaagacaggccgttacggcgtagacatcctggctgttatcgctgttgtttctaccatattgattggtgatgtatgggctgaatggatgattttggtaatgatgaccggtggtgaaacgctggaagattacgcaactggtcaagccaacaaggaattacgtgccttgcttgataaaacgccacgtatcgccaacaagttagttgacgggaagatcaccgaagttaaggttgatgacctgcaggtcggtgatactgttttgatcaagccaggtcaacaagttcctgtcgatggtcaaatcgttaagggcacttcaagcttcgaccaatcttcattaactggtgaatcagttcctgtgaccaagaaccctggcgacgaattaatgtccggttcagtgaacggtgatgtagcggtagagatgaaggtaactaaggctgctaaggactcagaatatcagtctattgttgcgttagttaagtcttcacaagctcaacctgctaagttcgttaagatggctgaccgttacgccattccgtttaccgttatatctttaattattggtggtgtcgcttgggctgtgtctggggatgcaactcgctttgcggaagttatggttgttgcttctccatgtccactgttgatcgctgctcctgttgctttggtatcagggatgagttcaatgtcagctcaccatattattgttaagtctggtccaaccctagagaagttggctcgcgctaagacctttgcttttgataagactggtactttgactgaaaaccaattgatcgttgaccaagtcgttactgatgacaaatcatttgatcaaaaagaattgcaaagcttagctgccagtgttgaacaacagtcaagtcacgttatcgctagttctctagttaaggctactgacaaggatttaattcatcccgtaactaaccttaaggaaactaccgctcaaggtgttgaaggtgatgttgatggcaaacacgttaaagttggtaagttatcctttgttgcgccaggtcatgaaaaattaaacgtcacttcaactgctgtttacgtttcagttgacggtaagtttgctggttacatcactttgaaagataagatgcgtccagagagtcctaagactattgaacgtcttcgtcgtcaaggtgcagaagatatcatgatgcttaccggtgaccacaagcaagtcgcagaaaaggttgccaaagaagccggcattactgatgtccgctcagaacttttgccatcacaaaagattcaagctattaaagatgtgccaaagcacctacgtcctgtcgttataactggtgatggtgttaacgatgcacctagtctgaccgctgctgatgttggtattgctatgggtgctaagggtgctactgctgccagtgaaagtgccgatgctgttatcatggttaacgatatttctaaagttaacgatgcagtcgctatttctaaacacacaatgaaggttgctaatatcgatgttttaactgcaattggtgtcgttattatcattgaattgattgccttcactggtgttatcccagccttctggggcgctattttgcaagaagtagtcgacatgattacgatcagcttaggtttacttgctaagactaagccaagtgataagcaatttggtttggaagaaaaatagattagatgtgaagaagctccagaatcgatttggttctggagccttttttcatacataattatgcgtagcactgcaccagttcaatttgcatctaagttaaaaaactattaagattaaactcaactaaataatttttagtggttgggtttttatcacaataaaaactttcaagattcgcttctttgggtcaggaagcacttgaaagttttttgtttttttacagaaggggaaaatatgcattttttaggacaacttatcttaatcctcttaactacagttttgctggggcaattattcgcccgcttcaatatgcctgcagttattggacaactattatcaggaattttactgggaccagctatcttaaattgggttaagccaaatgatatcatcagtctattctccgagttcggggttattctgctgatgttcttagctgggcttgagagcgatctagatttattaaaaaaatacttcaagctaagctttactgtcgccacagtcggcgttatcctacccgttgttttcatgggcttagccagttacttctttggcatgcgccctcttgaagcactctttatcgggattgtctttgcagcaactagcgtttctatctccgttgtggtgctgcaagaagcacaccaactgcacacccgtgccggcacagccattttaggtgctgccgtagttgacgatatcttagccgtggttgttctgagtctattcactacattcagtcatgaaggtggcaagagcggcttaactaataactttttgcttaatatcttgattgaagtagtttacttcgtagttgtttggctgatttttaaatttgttgcgccatactttatgaaagcttctgaaaaaatcgacgttgactattccgtcgttatcggttcattggttttagccttaaccatggcttgggccgctgattttgttggtctttcagctgttgttggtgcatttttcggtggtttagcaattcgtcaaacaccacaatacaaagaagttcactcctctgtttccgcaatcggctactctgtcttcatccccgtcttcttcgctgatatcggtctttcaatgacttttgccagctttttcaaggatatctggttcattatcgttatgaccgttttagctattttatcaaaattctgggccggaaaatactccagcgaaatctttggcttcaataagaatgaaggcaatatcgtcggtgctggaatggtatcacgtggtgaagttgcactgattgtagcgcaaatcggaattaaccaccatctcttccctgaggatatttattcaagtctgatcctagtaattatcgttacaacagttatttcaccatttattttgaattactttattaaaaagagtcaaaatagtacggaatttatgtagaaaaagtctagcattcgctagattttttaatagtttaattttacaagtggcttatcataaacgcaattgtgtctacatggtaaaatcaatagtgagaggtgagaaatatgttacaaactccaaacaatattagagctgttaccgctcgtgacctgcgcaataattttaagaaaattgctgatgatattaatgactatgatactaccgttatagtagctcgtcccaaagataaaaatgttgtgattatttctcaaaaagaatatgattcatggcaagaaacttcatatcttctaggaactaaagctaaccgcgatgcattagctgaagctaaacaatcatttgaaaaccaagatcaacgaaataaagttttaaccccagaagaattcgaggctttaactaaagatgacgaagcttaaccttaattttaactacaatgcctggaatgaatatcttgaatggaaaaaagaggataagaagacttcccaaaagattgataattttattaaagaatgccaacgccatccttttactggaaaagggaaacctgagccattaaaagcgaatttaagtggtgcatggtctcgacaaagtaatcataaagatcgcatggtttattcagttaccacaacagaattacaaatatggcagttaaaataccattattccaaatgaaaaagctctttcgagcttttttgtttaacccaattttcctaaatcgattacttggtcatacttctgcaactcatttgattcatagtggtgaattacttcaataaaggtaaggtttgagtttaacaagtaattatgaatttgatctgatgtcttcttatcaagggatgcattaatttcatctagtagcaaaatcgatctatcggccaaaattgcccgtgctagttctattctagctagctgtcccccagacaattgatccgcattatcacccaaggaatagtcccagcccttttcagcaataatttgatccaaacctaatttttggcacacctcgctcaccttttcccgggaaatatttgcacctaaagttaaattaaaccacaaggtatcggcaaaaattactggggactggctagcataagcgaataaatctgtaaacgagcctggcttttgctttttgtcgttaagcaatatttccttggcatgaccatgctttccggttaataggaattgtaataacgttgatttacctacaccagatggtccaataactgcaactttttgaccttttacaactgcaaagttaatttgattagctaattccttgccttttctagtaagatccagatcttctatttgcaaatttgcaaaattataattggtctctttcttttcaaccttgcccttggcaatatatttttctgccttagcgacaattttcttagttgttgataatttgtttcgatcttctaaaatagtcaaaattggattaagaaatgaatttgacagttgaacgattgcaaataaggcacctaaagtagtttgacccttaaccaccatgtaaattcccactaagaatggggttaagaacgtaaataaactagcaatcaagttaatccaagaattagtatctagattgagtaagttcattttacgcaaagcatcttctaattgattgatcaaaacttgatttttcttaaccgcattatcgcgcttgttgtataaatttaatgttgtgctaccagccagaaagtttttaatatgactaacatatttatcattagcagttgtccaattttctgctgcagtttgaatcttcttttgaaataaattagaaaccagcatcggcaaacatgaaccgattaaaaataataatgtaactaaccaattaacacataaagcataccctagcgcaaaaacaatcatataggcctgcatcattatttcaatttcagcatcaaaacgattagtttccagcagcttaaaatctgtagtcaaaaagcctaagctagcagtattttcttcgctagtctgacccagcatcccctttaaaatgccagctcgcagcgtcgtattagtctcttgaatagcacttgtttttaaccgattgaaaatcagcgaagcaataaaagtcgcaataaacgccccaataacaataactagaaattgtgctaaatcgccaaaccttctttgcgtaccaacattggtcaatgtctgtaccatatatgcaaaaatgatttgttgtgtactagcaatcaagcctaaaatagttaacataatgaattttgcatgtgaagaatatttgtaaatcattttttgtcctcctgtattttacttgaggctagtatcgcaggataatgacgaaaaatgttagaaatttacagatctgcaaatcgaggtaaaacattatgttcaaatatggttcaatttacaaacaattgcgcaaagatcaagaaatcactcaaactgaagcctgcaagggtatttgttcaatctctaagttatcacgctgggaaaataatcaggtagaagttgagtttagcaccgccattgcattactcaggcgcatcaacattacgcttgacgaattcacgcattacgctgcaatgaaaacagaatttacattgccagacgacattataacggccattaaagacaatgatacaaaggtactcgaaaaatttgttcaggagcagctaaatcattatcacgccaacaaaaatattctcgaactcaaaaacatcattcttgtctgcaatcaattatttctcatgactggtaaaaactatctaacacctgcagacattaatcgaatcggttcatacctgcttcacaacaccgtttggtctaaatacaatatcttgctttttgctaactcaccgtttttgctaaattctaaaatcggctatcaaattgctctgcgaattattcacaattttcaccctacagaaagtttaaacgaaaatactactattttcatgggcggtttatctgatacagttattgccttagttttcaaaaagaagctagattacgctcaaaaaattcttaatgaattaaaaaagataggacttcccttctatctcatgttctttagttcaacattgacccttttacaaaaaattatcgactactgccacactctcaacgcacagcctgtattggcaatgattgatgccatagttcagctaaattgcatggaagttgctaaaaaatggcttgagatttttaaagacgtacaacaaatctggccagaaaaagaaaattaaaaaccgtaaaagtaatttactttcacggcttttgacatggtattcattatgcaagcttacaaatttttagcttttaattaatccttaacaacgtctttggtgttcaaccattgactcttgttgatcttaacgatcttcttgccagcagctttcttaacatccttagcggtgtaagttgaacccattgaaaccttttggctagtcttgtgaccttgtgcgtccaaaacattaactttttggttcttagtgtcctttacagcaacaaagatcttgtcaccctttttaattgcaggatcagttggcatagtttcggcaacacctaactttggagcagtaaaactagctgcttgactaactgaagcaccaacacccattaaactcattgaagcaactgcgattgaaacaactttaactaaattctttgaaactaacataatgaatacctctaatttctatatcacttaatttgttggaactttttgttccctcattccttacgtctttattgtataacatatgttattaattacaaggggtttatcgaattttttaaaaataattcagtcgtctcaaagtattgctataataacgattgcggggattttttgtccaaaagcattaaaaaagtgtctgagaaaccgttctttcccaaacacttttttaagcagctgctacttcgtttgaattttgagtcacttttctagtttttaaactgacaaaaatcgctacaattagtgttattacctggattactaataatgtaaccaaagcaacagtaacattgaatgaaccagaaattgtggttaatactgttgtcataattggagcaacagccattaagattgtatttaataagccaacagttgaagccaagattttatgatcaactgatgttactagccattgctccattttaactgaagcaactcctgcaatagctgccaagaaaaacattgttatcataattacgtaagtatttcctaggaaaatgcttgttgtagtaacaatacttaaactggcagaaataattactaaactaaaaactgttaattttttgaataattgtggtccaaacattgaacccaatgcaaagcctgcgccaataaccacaccaaacaaagcaatagtaaagctataagtgccgattagcatagttgaacgatgagctgcaagtacaattgttgtcaatggagtaattgtatctaaagctccatttaataatgcgattactaataccacagtcaataatcctgattgtttcttcacttgggtcaatgaagttttcattgtttggaaaaagttttgatcattaacttcctttttttcaagtggcttctgatccttctgatgttttaagccaacactggcaaataacaaacctgctaacaagaaagtacctgcattaacaaaggctaaagttgagtatgacattactagcaaaagtgctgaaccaatgaattgagcacccatactaataatttgatttacgccgccattaaagcctactgcattcccgtattcttttttaccaacaatatcaacaattaatggtgcaaccaagccacctgaatatgaaccaatagtatctgataagaaattcacaacaacgatgattaaaaccaaattccactgtgacattttagtgataaacaataatcctactaaaccatataagataaatcggacaaatgctgctaaaaagatattgcgaaactttttcttagtcttatcagcaaggtaaccaccaaagatctcgaataattttggaactgattcagaaattgcaattaatgaaagtgctaatgagtagttttgtaatttgctagcataagtcatgaaagccaagtagaaaagaatatcgcctgcgcctgaaagaaaactagctactgaaaatcttctaaagtctgcgtttttaagaaatacgttcataaatcttaccccctttttctttgtttcgtttgttgttgaaattataataaagtgaaaaagaaattaattttaaaaatggcgtattcgacattcggaggataaacctatgacaattggtgaattactcaaagaaaaaagactagcagaaaacaaaactcaaaaagcatgggttggtcatattatcagtacttcttattatgctaaagttgaaaagaatattcatagaattacagcagaggatttattagccattcttaaacataatgatctttcaattactgactttttcgaagaattagcagacaaaaaggatgaactaaaagcacaagtaaactcgctaaataaaacagtaattgatgctgtttatcattctgatgtttccaaagttaatgaagtcattcaaattattaaaaaaatggatctaccgactaagcaaaaacaagaacttatcttaatcaataaggggtttatcgaaactatcaaaaatgatctaagtgacaattatcagccagataaaaacatcgttcaacaactaaaagacaaaatttttagtattcctaattttaatagattcaaacttgaactctatactaatttcatgcaattttatgattatacaactaatattatgatcaccaaacaagtgatccataaaatagatcagtttaagagcgataaagagttattagcaatcgctggtattctattcaatctcctttcacaattagtcgaagaacatcattatcaagaaactgcaccatttatagcagctagtgagcatttaccctttttaccagacttatactttcctcaaaccggaatctcattgctaaaataccttattagttatcattttaataaaaaaacagcagacttagctaaagctgagatgattgcacaaacttatcaaattactggtctagaagactttagtaaaggtgcacaagaaattattaatgaagttaaagaggactagctttaagctaatcctcttgtttcaatctctaaataaaacctaacgcgttatagcacatgtgcaccaaaattgaatagcgcaaatctttggttgacatatagacccaagctaaaaccatgcctaagacccaatatactaagatatacttacttaatgccggatcatgcatatagccaaataaaaatccgcttgcaacaatacctagccacttatttctagtatttttcttagtgaaaaagatattgaaaaacatccctctaaagatatgttcctcacaaaatggcgcgatgaaaactactaggatcctaaataaacctgcattgtattccgctattttattcaagctttcctggttctttgaaacgccgccaccaactagattaagcatcacaatcgaacctactacaatcagtacaaaaccgatcatcgctattccgattctgcgccagtcccagtgtggtgtttcatcaaagccccaatcattttcttcttttaattgcctgcgataaatataggaaattgcaaacaaaactattaccgtagcaagcgccgtaacgaagacgcgatattgcgccaaatcaaatcgctgaggtctaaagtaaagtacttctaattcagaataaattaccaaagccaacacagcccctgcaatatttcccaggtaatgtccaaatctcttcatttttcattcacaccttgattctttcaactagtaatcattgtttctattataatgtaaataagaaaaaatacctaaggaggagtatctatctatgcttaatcagatcatcgcttttttggggagacgcggtgagttcttctacatttcagtctttatgttactgatattttttgcctttttaatctcttggcttatcgaaccaagacgtttgattaatggcgttttgtttactatctttatagtctcaatgctctcttggatcaccgttatggtgcacaaaagtacgagtcacggcttgcaacgtgcctatgacctactagttctagctgcattatttggcattgtcttattattaattttcgcctggatttttctattctggaatgcctatttcgtttggaaatatgaaagccatactttgcctaacttgcttactttaattaccggatttttagcattaattattagtattatcgtgctcttaggaccaggtaagtacttgccacgttggcttagtctcgcattagcttcaattcccgcgattgcaatttatttgggattggtgctttacaactttttggtaaacttgcttctatatcaaatttatcctcgtacctaccaccaagactatttaatcgttctagggtctgggctaatcaatggcgaccaagtatcaaaactgcttgcggctagaattaatcgggcaattcaatactctaaccgccagtatcaaaagggccgcaagcgccctatcctgatcatgtcaggtggtcaaggcgctgacgaaaaaatctctgaagcactcgctatgtctcgttttgcacaacggcgtggcgttagtgttgaccgtatcttattagaagatcaatcgaaaaacacatacgaaaacatgctcttttctaagcgtattgccacaaaagattttggtaattcccacttcagggcacgcttctttagcaataattaccatatttttagagctgctctcttggctaaggaagttggtttaaaagccaatggtgtcggtgcttacaccagattctactacttgcctaacgcaattatccgcgaatttgccggtgtgtttgtcatgcataaacgccgtcatttcgttatcatgggattaatcgttttattctttatcctgcaagctatcttagtcatgacaggattagaaagatttactgtaatttagaaaagagggatgcaatgcttcaactaaagcatatttttaagtcatataaggtgggggacaacatcacccacgctttagacgacgttacaatctcgttccgtgaccaggaattcgtcgctatcttaggtcctagtggttctggaaaaactaccatgttaaacgtaattggcggacttgaccgttacgaccaaggtgacttgatcatcaacggcaaatctaccaagaattttaaagagaccgactgggatgcttaccgcaacaataccgttggttttgtttttcaaaattataatctaatcccccacttgtcgatcatcgccaatgtggaactagggatgaatttgtctggtgtgcctaaaaaacagcgccatgaaaaagcaattgcggcgttaacagaagtgggattgaaagaccatctaaataaacgtcctaaccagttgtctggcggtcagatgcaacgagtagcgattgctcgagcaattgccaacgaccctgatattctactttgtgatgaaccaactggtgcacttgatactgagacttctgtccaaattatgaagttgatcaaaaaactatctaaagatcgactcgttattatggtgacccacaatcctgaattagctaaagaatacgccacaagaatcgttaatttccaagacggtaagattcgtcatgattctgatccttttagccctaataaggaagaagacaaatttaacctcaagcgtaccaagatgtcttactggaacgccatcaagttgagtttcaccaatattatgacaaaaaaaggtcgaactctgctaactgcttttgcttcaagcatcgggattatctcaattgccgtagttttagctatctctaatggttttcaaaagcaaatcaataccacaatgagcaaagctttagcaaaatatccgatttctatttcacagaccgcaactgacattacttcagctaatgcacgtaaagaatcggataaaaatgtcaaaaaccgcggctatgtaacggcagaacaagaccaaagcgaacaggcccaacacgttaataaaattagcacaaagtatgttaactacatcaagaagatcaatcctaattatgccaataacgtgtcttaccaacgcggcgtaagcttgaatttattagctaaaaacaagggaaaaattgaacgcgtgcaattttcaaatacggatcctgatcagactaattctgttctagctgctagatcccaagcgatgagttcaatgggactgggttcaagtgtctttcccactactttaaataaagagaaagactcatttttgaagcaaaactatcaattgctctcaggcacttggcctactaaggcaaccgacttggttttagttactgacaataaaaatactgttaacatcaatgccttaaaaaatcttggtttcgatttaaagaataaggaacacgtcaaattcggccaattagtaaataagcaatttcgtgtagttgctaacaatgattactatcagcaattgccaactggcatgtttattcctaaaaaggtaaataacgccatgtataacggtgctcaaaccaagctaaagattgctggtgtcattcgtcctaaaaacgaagattcaatggccttgttatcaactggaattgcttatagcgatcaactttcacaacgcgtgattaatgaaaataaaaactctgcaattgtaaaggcacaaaagaagagtaaccatagcgtattaactaaccaaaaactaaatgccaatgaaaagaaagctacaatgcagactcttggcggtaccagcatccctactggtatcatgatttatcccaacaattttgatgataaagataaagtacttgattatcttgacaaatggaacaaggggaagaaaaaatcagacaagattctctatactgacatgtcaaacgctgttaccacaatgactggcggcctcttaagcgggataacgaccatccttgtcgcatttgctggtatttcattaatcacatctatgattatgattggtattttaacttatacctcagtacttgagcgaactaaagaaatcggggtactcaaggcattaggtgcccgtaaaaaagacattactcgtgtctttgatgccgaaaccttcatcctaggtgttttctctggtgtattaggcattctgattgcttacctactaacattcccaattaacagtatcatttacaagattactgatctggcaaatgtagcccaactagatcctactgctgctattgttttgatcattatttcaactatcctcaccctcttaggtggtcatattccagcacgaatggctgcaaagaaagatgctgcaattgcattgcggagtgaatgaatttaataaagaatttgttacgttgttcacaataacctaaatttttagcaaaatatgtggtatcttagctttagcaaaaacaagtaagaaaggaacttttttcaccatgactgttaaaaaattagaaaataacagcgatgttaatgtagtggcagaagaaagcaaagttttaactgatttattgaatgaatcaactaagcaagtaatcggtcaagcagctttcgataagatccaaaacttaattaaaatctctgccgccaaagattatcaagaacttgaaaagcaaattgctagtcttaacaatcgcgaaatgattgttgttgcacgttattttgctactctcccactcttgatcaacatttcagaggatgtagaactagcaagtaaagttaatgtgcttaacaatactcatcaagattatctaggtaaattgagtgacacaattgacattgtagcccaaaagaaaaatgccgaagaaatccttgaacatgtaaatgtagtacccgttttaactgcccatcctactcaggtacaaagaaaaaccattttggaattaaccgatcaaattcatcaacttttgcgcaattatcgtgatgtgaagaatggcacaattgatcgcgatgaatggactgaacaaatgcgggcttgcattgaaattttgatgcaaactgacattattcgtggtcacaaattaaaggtagctaatgaaattaccaatgttttggcttactaccctaaggctttaatccctgcaatcaccaaatttactagtcgttacaaggaattagctaaaaaacacgggctaaacgctagtcatgctacgccaattaccatgggaatgtggatcggcggcgaccgtgacggtaacccttatgtaacggctgatacgctagaactaagcgctactttgcaaagccaagtaatctttgaatattacattaagcaaatcaataagctttatagagccatttccatgtctacttcttatatggagccatctgacgatgtaatgcacctatctgagctttctaatgatgattcaccattcagaactaacgagccatatagacgggcattctactatattcaaagccgtttagtgcacactgaacaaaaattactgaatattactaacaagaacactttcttaaagaaacgtgacctccaaaatcttgataaaatcccttgttatcaaaatgctcaagaatttaaagccgacttagaaatcatcaaaaattcacttgaagaagaccatgatcacgccgtagtagacagctactttactcaaattcttgaggctatcaacatcttcggcttccatctagctacaattgatatgcgtcaagattctagcgttaacgaggcctgtgtcgctgagctacttaagagtgctggaatttgtgacaattatagcgatttaagcgaagacaaaaagatcaagcttttactcaacgaattgaacaatgatccacgtaacttacacgccaataacaaacccaagtctgagttactacaaaaagaattaaagatctacaagactgctcgtcaattgaaagaccgtttgggtgaagacgtcatcaagcaacatattatttctcacactgagagtgtttcagacatgctagaacaagcaatcatgttaaaggaatacgatttacttgataatcaaaaagcccgaattcaagtggtaccactatttgaaacggttgaagacttgaataatgcccgggaaataattaaggaattcttaagctttgatatcgtcaagaagtggcttgtttctcaaaataattatcaagaagttatgttaggctactcagattccaataaggacggtggctacttagcttcatgctggaacctttataaagctcaaaaggatctaactaagattggtgaagaaatgggtatcaagattacctttatgcatggccgtggcggtaccgttggtcgtggtggtagtccatcatacgaagcaattacagcacagccattcaagtcaattaacgatcggatgcggatgaccgagcaaggtgaaattatccaaaacaagtatggtaataaagacaccgcctactacaacctagaaatgttagcttcagcaacaatcgatcgaatggcttctaagcaaattgttagcgaagatcatgtcgcagatttccgttcttcaatggatcaaatcgtagctaaaagcaacgaagtttaccggaaactagtatttgagaatcctaacttccttaagtacttcttccaagcaactccaatcaaagaaatctctggtcttaacgtaggttcacgtccagcttcaagaaagaaactcactgacttttctggcttaagagccatcccttgggttttctcttggtcacaaagccgtgtaatgttccctggttggtatggcgtaggttctggtttcaagtcatttatcgatgctgatccagccaacttgaaggaattacaaaatatgtaccaaggttggccattcttccactccctgctttccaatgttgatatggttttatctaaatcaaatatgagaattgccaagcagtatgcggatctttgcgaagatgaacaagttaaatcagtctttgatatcatcaatcaagaatgggaactaactaagaaagtcatcctacaaattgaaggtcatgatgaattaatcgaagatgcacctactcttaagaagagtctggaatacagaatgccttacttcaacattttgaactacatccaattagaaatgatcaagcgtgatcgtgaagatgtgattcaaggtgtttaccaaagtattattccaattactatcaacggtgtggcttccggtttacgtaattcaggataaaaaacacataaaattcagctaaaaaaggctcctcattgcctgttttatcaagcatttgaggagctttttttttaatttattaaactttttagttacgcctttttcataactaagttaagtggcgttacaattactggaacgacaatggctgtaaaaattgcttctactaaaccgttcatgcccagtgccataattaaaattaaaatcaatggcgtacctgaactataatttcctaggtaatgagttaagcttgctggatcatgcatgaagaaaatactcgtcagcaaaataaccatcacggtattagttaacgaagtgactgctccacttatgatataacccaatttcgcatatttagtcttactcatacccttcgcaataattcccgggaaatagccagccaaaatacttggtaccaatgaaattaccggattttggaacaacattaagctgaccatatcgccaggttgagtatatgcaacaatcaatctggtaataccccagaataagccaaagcctagacccgccttttgtcccattaacgtgccatagacggcaattgtcattggaatagtagttacagctggcaaagccgggataattcttacatagccaacatttggcacaaaagtctgtacaatcaataaagcagcaaagacagcagtaattgctaatcttttagtttcttctcttctcatatatttctccaacttaattctttagactcaattaaaccataattaagattttttctcagcaaaaaagtttattatacaatatctaggtatattttatctaatatgacaagatattgtattttttattatttttttacttaattatgcattatccttactctctctaatgcataatcgtgttctataccaattaagaatccctttatatcaatactttatgttgcatgtcaattttgacatagccactaaatattgttaatctcgttttgtgttaaaaatcatttgatggagagaggatcaattttatgaataaaaaagtcaaaaaattactatctattggtgtgcttgcattgagtttaggtgcaattttaaccgcctgctctggtaaaaaacagggtgcaagcaataataaatcaagcgatgccaagcactctattgcattaattactggcggtaatggtgtaaatgataactcttttaaccaatctgcttgggaaggatttcaaagttatggcaaagagcacaacttgagccgcggtcgaaacggttatcaatattttcaatcaagtagtgctgctgatttcactcctaattttgatcaggcagctaaagctggttatcaaactatctttggcgttggttacagtttaaaagatgccgtagcttctgccgccaaacgctatcctaaaaagaattttgccattattgacgatgtaatcaagggacaaaagaatgttgtctcagctaatttcaagagcgaacaagcttcctacttggctggtgtcgtagctgctaaagaaaccaaaaccaacacggttggcttcatcggcggtgctcatggcgatattgtcgacctttttgatgccggatttactcaaggtgttaaagatcaagccaaaaaaatgcacaaaaaagttactatcttaaaccaatatattggcaactttactagttcagacaaggccaaatcaattgctcaatcaatgtacaccaaaaaagccgacatcatcttccatgctgctggtggtgctggtgatggtcttttccaagaagctaaagccattaatcaaactagaccagctaaagataaagtgtgggtaatcggagttgatgtcgatcaatctcatctcggtaactacactgctaaaggtgggcaaaaatctaattttgttttgacatcagtaataactggagtaaatgttgctgtcaaagatatcgccaatagagcttataataataaattccctggtggcaagaatttggtttatggacttaaaaacaatggtgtttctattgaacgaggacagatttcagcttcaacttggaaagatgcccaaattgctagagctaatatcctaaaaggcaaaattaaggttgccattcatcctaacaataaataaaagcatactagtatagtttgctttttataattacaatcaattattttttgcctgatcaatatttttgttgacaaaataccgagcaattaataaacttatttataaattgttcggtattaatattgtggaggacagaaataatgaacgtaaagttcaagaaaattttatcatttggtgtcgttttagcatcagttggcttgattctaactgcttgttcgggtaaaaagtctggtcaatcagccaacaaagatactaaacatggcattgccctaatcacagatgaaaatggtgttgatgatcattcatttaaccaagctgcatggtcaggatttaaagcatacggcaaggaacatggtttaaaacaaggaaaaggtggttatcaatacttccagtctagcagtgccgcagacttcactcctaactttgatcaagccgctacagccggctaccaaaccattttcggtgttggctatcaattagccgacgcagtcaagcaagcagccaagaagaatcctaaaaagaatttcgttatcattgatagcgttgactctgggattaagaacgtcgcttctgcaacctttgaaagcaatcaagcttcttatcttggcggattggccgcagcttacaccactaaaaccaacaaagtaggtttcattggcggtgctaagtcatctattattgatttattcgaagccggttttaagcaaggtgttgctgacggtgctaaagctcttcacaagaagatttcagttcaaacccaatacatcggtaacttcacttcaaccgataaggctaaatcaatcgctcaatcaatgtatgctaaccgcgctgatattatttaccaagcagccggtaacgcaggtaacggtgttttccaagaaggaaaagattacaaccaagcccgtccagcagctaaaaaggtttgggtaatcggagttgacgttgaccaatctaacctaggtaactacaagtcaaaagatggtaagaaagagaacttcactttaacttccgtcttaaagggcttagatgttgctactaagtcaattgctaatgatgcttacaatggtaaattccctggtggtaagcacttagtttacagcttaaagggtaatggggtttaaatcaccaaaggtaatttaaacgctaaaacttgggcagcagtacaaaaggctcgtcaacaaattattgatggcaagatcaaggttgctactgctccaactaagtaattcagctgcttagtattttgagaactcttcgttttttagcgaagagtttttctatagttaattaaggaagtatttatttacatgaaagaacagagaaataaagtaatcgagatgcgtcatattgtcaaagatttcgatggtttcaaggcaaatgacgatattaaccttacgctctatcaaggtgaaattttggctttgcttggtgaaaatggcgcgggtaaatctaccttaatgagaattttatccggcttgcttgaaccaacaagcggtgaaattctggttaataatcaaaaagtaaatattaaagatccaaccgtcgctaaaaagttaggcattgggatggtacaccagcacttcatgcttatggactcatttaccgttttagaaaatattattctaggacatgaatcaactaaaggaccagttatcgatctgaaaaaggcaagaaaacaggtcctagctcttgcacaaaaatatggctttgctattaatccagatgccaaaatctctagcattactgtcgcccaacagcaaagagttgaaattctaaaggtactttatcgtggtgcagatattttaatttttgatgaaccaactgctgttttaactccacaagaaatttctgaatttattaaagtactcaaaaatttagctaaagaaggcaaatcaatcattttgatcactcataaattagaagaaatcaaggctgttgcagatcgagttacagttatcagacgtggtcacgatgttggtacttttgctgttgatcaagttagtgatgagcggttagccgaattaatggtggggcggcatgtcaacatgaagctaaccaaaccagcacctaacttgggcaagcaaattctagcaatcaaaaacttacaggtaaaaggaaatcacggtgccttaagcgttaaagacctttccctttcaatccgtggaggcgaaattttagggctagccggaattgacggcaatggacaagatgaactggttgaagcaatcactggtttacgccatgttaagtcggggcaaatcttaattgatagtcaaaatttaaccaaccaaaaagttcgcaaaatcaccgaagctggcgtagcgtatattcctgcagaccggcaaaaatatggtttaattcttcacatgtcattagctgacaacttagcgctgcaaacttactaccaacgtcccttctctaatcatggcatcattaatcatcaagcaattttgaagcatgccgtagatttaattaaaaaattcgatattcgaactactagccctgcattgccagctagcgacttatcgggaggtaaccagcaaaaagcaattatcgctagagaattaaatagaaacagcgatctaatcattgcattccagcccactcgcggtttagatgttggtgcaattgagtatattcataagcagcttttagctcaaagagcagcaggaaaagctatcctattaatttcatatgaacttgatgaaattatgcaattatctgaccggattgctgttttgcatgatggtcaaatttcaggcgaagtattacctgaaaaaactacagatcaagaactaggtcttttaatgaccggtgttaagaaagaagatgcaacaattgattaaagttacacctaaagtcaaaaatattctagtaccagttatctcagtaattgctggttttatagttggtgcaattatcatgctgatttggagttataatccttttcaagcatacagctccatgttctctagcgcactgggcaatatgaatggtattggtgaaactattcgtgaagctacgccattaatttttattgctatcggttttgcaattgcctcaaaagctggcttttttaacatcggtttgccaggtcaagcacaagctggttggttgacttctatttggattgtattggccaatcctcaattgcctaagccagtattattgcctttagctattattgcaggcgctatagctggtgctattgtggcaggaattgctggctatttaagagctcaatttggaactaatgaagtaattactactatcatgcttaactatattgtgctctatacttgtcaatatttaatgcaacaagtaatgtcctcaaaattaagaattgataccgatactaccaaaacaattccagccaatggcagcttaaagcttaactggttaactagcatgtttggtgattcgcgaatcaatgctggtattttcttagcaataattggacttattttttattggtatttaatgaaaaaaactaccgttggttttgaaatcaaggcagttggactcaatccttttgctagtcgctatgccgggatgtcttctaaaaagaatattattatttcaatgttactttcaggtgcattttctggcttaggcggtgtagtacaaggacttggtacctaccaaaactacttcactcaaacaactagtttggatattggctgggacgggctttcagttgccttacttggtggtggaactgcaattggtattttattagcttcacttcttttctcaattttaaaaattggtggtttgggcatgcaaactattgccggtattccttatgaaatcgtatctatcgtaattgctgccatcattttcttcatcgctatcaattatgtcattggtttgctttttaaaactaagaagaaccgcagtgattactacattccaaccagaaaagaaaaaggacccaacaatggtgttgatggtccaggtagaaaagtaatcgaaggagaaaaataatgaatttcgttacaatgatggcgttaattgtttcatccactttagtttattctgcgcctctaatcctagcttctcttggtggtgtttacagtgaaaactctgggattgttaatattggcctggagggtatcatgaccatgggagcctttgcggcgattgtcttcaacctaactttcgcttcaacttttggtgcagctgctccttggcttggcactctagtcggcggaattgttggtttgattttttcattgcttcacgctgttgccacaatcaattttcacgctgatcatgtcatttccggaacagtgctgaacatcatggcaccacctttgggtgttttcttgatcaaggcaatttatgataaaggccaaactgaaaatatcaccgctaactttggctacttcagctttcctggtttaagcagcattcccatcgttgggccaatcttcttcaaaaacacctctgcccctgcttggattgccattattcttgctattttgatgtggtggattttatataagactcgctttggcctacgcttacgttcatgtggtgaaaatcctcaagcagctgacacaatgggaatcaatgtctatggcatgcgttatgcaggtgtattaatttccggctttatggcaggtcttggcggtgccgtctttgctcaagcaatatctggtaacttctctgtttctactatcgttggacaaggattcatggctttagctgccgttatatttggtaaatggaatccaatcggtgcaatgctctcatcccttttctttggttttgctcaaagcttaagtattattgggcatcaactgccaggaatcgatcaaattccatccgtttacatgcagattgcaccttacgttattacaatcatcgttttggtcctcttcctcggcaagtcagttgcacctgccgcagatggggttaactacatcaaatcgaaataaggaaaaaaggttgtttcacatgaaacagccttttattttacacatgtccacatagttatccacaagatatagcacttatatgtggtagtcttactatatcttgtactaaataacagctatcggcgttttctcagttggcattggaaaatcactgttaagcaatctaagctcatcatctgtaagtttaatcttttgtgttgcaatattttccttcatgtgttctacactacttgccttaggaatcgttaaaacattgccattgcgcatcgtccaagctagcattatctgatgaggcgtaacgccatgatcacgtgcaacaattttcaaattacgcgtaattcgaattgtgttgcccttgcctgaattaaatggtgaatacccaataaagtttacaccgtgctcttcttgccaagcttgcagatcaaattctgtcccacgttcactgatattgtataagtcttcattagcaaagcattcttctccacctggcactgtaaaaagctcctgcatatcagccgtatcaaagttagatacaccccaataacggatcaagccatctttttgtaatgcttgtaagtcgtggatcgtatcagacaagcgatgactgccccgccagtgtaatagataaagatccagatgatctgttccaagacgttttagactggcttctagactctgacgttctagttttggcgttgcatgataggggtagaattttgaaatcaaaaataatttttcgcgatcatatcctttaatcgcttcaccaattagctcttcgctttggccatccccatacatttcggctgtatcaattacactcaggccatgatcaaggccatagcgaatagctgctatttcatcttttttctttttaggatcttcacccaaaccccagctaccaattcctaaacctgttagtttttcaaaattcatcctcgttcacttccttatgttcaaattttaacataattgattcgtaattatttttatcaatcaattgacaaaatggtctattccattttataatggactagaccaacaaatgaggaggacttaattatgaaagttattgttaccgaaaataaaattcaaggtggagcaaaagcatttgaaatttttgaaaaaggaatcaagaacggtgctaaagtcttaggtttggcaaccggctcaacccctgaaacactttaccaaaactgggtaaaaagcgatcttaactgtgaaaatcttaccagcattaacctcgatgaatacgttggtttaaccccagataatcctcaaagctaccactacttcatgcaaaagcatttatttgacaagaagccatttaagaagacttacgttcctgacggtatggcaaaagacgttgatgctttttgtaaagaatatgatcaaattatcaaagacaatcctatcgacattcaactattaggaatcggccgcaatggtcacattgcctttaacgaaccaggcactccattcaacatcggcactcatgaagttaagttaaccgaaaatactatcaaggctaatgctcgcttctttgacagtatcgatgaagtgccaaagagtgctatctgcatgggtactgctaatattatgcaatctaagaagattgttttgatggcttttggtgaaaagaaagctcacgcaatcaagaaaatgattgaaggcaaagtcactgaagaagtacctgcatcaattttgcaaaaacacccagatgtaacggtgatcgtagacgaggctgccgcacaagaattagacgacaaatacaagaactaaaaacaataatttaattatcagcatagaaaaagctaggctttctacaatcgtggaagacctagtttttttatttagcagcctgtatctacaatgaaatatacttcacaaaattgcatttttatataaaaaatgaagcataattcagttttttattgaattatgtttcattcctattcgattttttatttctacccttgacttttagatgtgaaacataatcaaaaaatcacttgtgtgccacaacatatcgtattaaacttaataattgtctacatatggtatttaagaaagaatgtgattcaagttattgttttaagtgggccaattggagccggtaaatccagtttaaccagtattctagctgaacatttagggactcaggcattctatgagggcgttgataacaatcccgtattgcctttatactacaaggacatgaagcgttacacttttttgcttaacacttacctccttaaccaccgtttagcacagatcaatcaagcaattcaagaaaaaaacagtgtctccgatcgttctatctatgaagatgcactgttcttcaagatgaacgccgatagcaaggtcgctgatccaaccgagttcaagatctacgatgacttactcgacaacatgatggaagacactcctggcaatccaagtaagaagcctgacttactgatttacattcatgtctcccttgatactatgcttaaccgaatcaagaagcgcggtcgttcatttgagcaaatcagcactgatccaggtttgaaagattattacgcaagacttttaaagtactacgaaccatggtatgaaaattatcatgcctcaccaaagatagaaatcaatggcgacaaacttgattttgttaccaacatggatgcacaaaaagaagtacttaaagaaattgatgaaaagttgcatgaaatcggcaacttataagaaaaagaaggaacgtgatgacagttattgttttaagcgggccaattggagccggtaaatccagtttaacaggtattttatctaaatatttagggactaagcctttctatgaaagtgttgatgacaatccagttttgccacttttttacgctgaccctaaaaaatatgcattcttattgcaagtatatttcttgaacacacgcttccacagcattaaagacgcgctcactgaagataataacgtcttagatcgttctatctatgaagacgccttattcttccaaatgaacgctgatatcggccgtgctacttctgaagaagtcgatacttactatgagttattgcacaatatgatgggcgagttagaacggatgccaaagaagaatcctgatttgcttgttcatattaatgtttcatatgatacgatgatcaaacgaattcaaaaacgtggtcgtccctatgaacagttaagttatgattcaactttagaggactattacaagcgtctgcttcgttattacaagccttggtatgagaactacgattactcacctaaaatggaaattgacggtgataaattagacttcatggctaatccagatgataaagaaaaagttttggatcaaattacagccaaactaaaagagatgggcaaattacctgaagattgggaaaagcctaccgatattcaaattgaagcataataaaaaccattcatttgcgaaattatcgtatttgaatgattttttgtttacagtgaatttttcgctttattgttgtataatttgaaaaaatgtgtttaaaggaggagtttgaaaatgatgttaaccgtaactggtggacaatggtttttcccacttgtcataatttgtctaattttgggtattgtcgcaaccatcgctcaaaagaaaaagctgactaaactaaaaagaataaccgataactttgcctatgcaatattagttattctcttaatcattgaatggattctatattttcaaaaacaatttaattttattactccagcaatctacacccttgttgtcatctatcttattggacggcaattactaatcagataccgttcttctctattgaaaaaattaggggctaaatataagcaactgacaattggacttgctactatttacattattttagttaccttattgcttttaatcggatctaaattttcaactatgggctggatcattgctggattagttatcgtagcctttggcttcgttagctacatctttgaaaaagacaaacaataatttcccaggaaataataactcgcatagagcttctatgcgatttttatttattcaatttttgctaatgccttcgcaaccccatcatgattgttatcagcagtaatttgttccggagcaaatttttgttttagttctgctggggcattacccattaaaaatggataccccacttcttccaacatatcttcatcgttatagttatcgccaaaagcaatgcaattttgcaagtctacgccatattcttgagcaactattttgactgcactagccttgcttacaccctttaaaacaaattctaataaattctctgctgatctaacaaaagtcaaatcaggatatttagcagttaattcttcttgcatacgatcaagatccgctgaatctcccataattagacctttatgcacgccctgcagtttttcaagttgattaattgtagtcggtgttgcttttacatcgacaattctttcttcatttttaacccgtgggctcttttcttcactacaataccaaacatagccactatagatattccaagctgcatcattatcttgctcatcaacgtagcggcaaatttcagctgcttcttttgcattaaaaaaacggctgattagtactttgcctgtttcatcaagggctaaagcaccgttatacgcgataaacggacaaactttcaaaatttgattaaccactgtcatcatccctttaggaagacgtgctgatgcaggaacgaaaatattaccattaataatttgtctacgaattgcatcccgcgttgcggcggttacctttaaatcatcattaattaatgtgccatcaagatctgaaaaaataagttgtgcggacattctttcacctttatttcttttttaattcttatatcctaggataatgctttatttatgctaatgaaagctgattcaattaaatgcttttcctatcatttaaagataaattgcaataaatgcccaagtaatcattaaaataattcgcgtttacaaatttatttatcaatgctaaagtataagagttgtgttcaataagttaaaacacgaacaatattttggggagataaaatgaattttataaaaagctactttcaattagataagtacaaaaccaacattcgaactgaatttattgctggtttaactacctttatcagcatgtcctatattttgtttgttaaccctagcgtactgggcgccagcggtatgaataccggtgcagtcttcaccgctactgctttagctgccgctcttggtactgcaatcatggggatcgttgccaactacccgatcggtgaggcaccagctttgggaatcaatgccttctttgcttacaccgtatgtattgggatgcatgtttcatgggaaacagccttggcttcagttttcgttgcatcaattattttcatcttaattactttattcaaattaagagaaaagatcattgattcaattccagctgacttgaagttcgctatttcatcaggtatcggtttattcattgccttcttaggtttgcaaaacggcaagttaatcgttgcaaataaatcaactttggttggtttaggttcacttcacgatccacttgtttggattaccatttttggtttgcttgtaactgttatcttgatgatcttaaacgttcctggtgcaatctttatcggtatggttttggcagctatcttcggtatttgtaccggtcaaattgcattgccacacaaggttatctcaactgctccaagtttggctccaacttttggtcaagctatcttccacgttaaagacattaacactgttcaaatgtgggttgttgttttaaccttcctgcttgttactttcttcgatactgcaggtaccttaatcggacttgctcaacaagctggtttcatgaagaacaacaagatgccacgtgtaggtaaggccttagcagctgactcaagtgcgatggctgttggttcaatccttggtacttcacctgttggtgccttcgttgaatcaagtgctggtatcgccgttggtggccgtaccggtttaaccgcagtttttgtagcgatctttttcttaatctcaatgattttcagtccattgcttggtgttttcactagccaagttactgctcctgccttaatcattgttggagtattaatggcacaaaatactgctcatattcattggaacaagttggaaattgcagttcctgcattcttgattattttagggatgcctcttacttactcaatttcagacggtttatcatggggcatgatcacctaccctatctgtatgcttgctgctaagcgtggcaaggaagtcacaccgatgatgtgggtactgtttgtagtattcctgatcttcctgtgggtactgaacttttagatgaaaaagaatagataaagaaaaggactaagttcgaatttgaacttggtcctttttgtgtattcactaacattactttttattcttatcgattataatcgataaaaacgtcaaaatcaccaatcttatcgagtataatcgataagattgcaaaaaaagagtcttttatcgactatactcgataaaggctcttttttatattacccaggaaatattaacgtacagtttctaaacaatatgattttttataataaaatgcgtcataacaggcgaattttaattggctttaaaatttcttttttctaaaaacaagatagcctaaaagggtaaaaagaactatatagcacaatgtaccaattaataattgtggattagagagatgggaggttaagtgataagttgcataattataatactgtgtcgttaaattgagcatattcaaaggattccaacgaataatatcaaccggtccaatattataatttaataaattagatgatagactgcttcccataaagataataattgcatttatcataataactacggtgtttgaattaatcatacaagacattaagcaaataaggctgattattaacgtagaggttataatatcaacgcctgttgttgaaagcatatttataaataatgactgattatacttataagtcgcagtccaaggaactatttttgctataagtggaacagtgttaaagaagatagttacaatcatagctatggcatgtagaaaaagattataaataaaaattgtaatgaactttgcaagatatactgttcctttattttgagcatgatatagtaatgtcaaaatcgttttgttttggaactccattgagaaaatagttgaacctactatgaccaaaatcaacataattatttggctagagttataacaagtcataactaacaaattgccatattgttttcccatggccaatcccataaaaatcataaaaagaatcataaaactgataatccaccaaggcagcttacggtgacctaacttatagaattcttgttttaattccgcacgcataaaagatcacctccgcctaaatagaccgctttttaaacagtaaagcgccaatccaaaagaaaactacagcgtacactaaattagcaataattaattctgaattagtcaaatgtgttacagtaaccatctcattattcgatagttgcgtaatgatattaatcatatttaatggattccaggctaaaattgatttcaaaccaggaaaagccgacattgctaaatttgaaagatctgaaccaagaaatccgattgctagtccgattatgatcactgttgcattattcctaatcaacaaaataagcattaaagagagggcaacgataaatattaaataaatcatcgttcctcccatatttaggaatagcgcattgattaagggatgtccatgataatcatcatgccaagaaaatttcgaaccaaccatcaaggtcttgagaataaacgaaaagattatcccaaataccagtaagatgaaactataaaaaactaaaacaatgaacttagctgtataaagaatggacttatgtgatgttttgtagagtaaggttgccatagtattatttcgccactccattgcgatcatatcagaactaatagcaataatgatgataatagcccattgtcctgcaccgaatccttgagataagagtgagggcgtcattttataacttgtaccaactgtatacaacattagtactaataaaacgagaatcccatacaatggaatcttgcgatgagcaaatttatagaattcgtgtgagagattaattttcattattatctcccccttgttcttgccgtaagatgttgacaatcttctgttctaaagttaagccagttggagccaaatattctatccagatttcattatcaaacagtagcttttgaattttatctatatctttatgatcaactattacagcatcatcttgtctatcaaaaggaattttagcttgttgtagcaaattggtagtttgctttatatcagttgtttttaatttagattttggatttttttcttgagtgaatttgctcataggtgaatttataataattctaccgtgattaataatgattaccgatgtcattactttttgtaattcacttaagacgtgactggaaattaagaaggctgtaccacgtgcagcgtattcatgtatcagttttcgaattaagattgtagcttcaatatccaaaccattcataggttcgtcgagaataaccagttgcggattatttaacaaagccaaagctattcctagtttttgcttcattccaactgagtagtcttttgcctttcgatcaatataatctttcatccctaatcgattaatcagtttatccataccacttaagtctttagcatagagctttaaattatcatatccagacagaaaaggataaataacaggcttttcaattaaagcaccaacagattgtagtgctaaatgatctttaagagtaatttcgtgatcattaaaactaattgaaccagtgaatttagttaatcctagcaaagttttcataatggtggttttgcctgctccgttatgaccaataagtcctacaatttcaccaggtgaaattgtaaaagatgcatctctaataatctctttgtgaccataaaaaatatttatattgttaacttttagcatgctatcctatctcctttaactccggattagacagagagttaaatcacttttctaattaaagtacctatattaaagtctagtatcctttcctgaattgtcaaattaagtgcaacagtgtaagtgtcaatgtttttgcggtagcctttaaaccattagtctaaccttaatttcttaaatatttatatgacttaaatttctgcttagcttgcttaaataactattgccagctacctgtgcggttaatgcgccatgctggatgcctaaatgaacttcatgacgcttctttaagctgtcacgggccgctgcttttaattcctgttcagtcaatacagttatttctgaatcttcaaactcgctgctaagccaaaattccagctctcgattcttgatgcagcttaagatcctaagcatgccttctgctccagattttgaccatttcttgccttgccccttaacacggtaggtatacttgcggtggttgctctcgcagcagccaatggctttagtcacagtcagttttcgtttcttaaacggcttaatatcgtcccaatgacgatcaatataattccttaggcgccccagataatcatgattgagctcggtattcaattcatcaattagtcggctttctgcagtggttaggatagttttaactttgtcatagctgtatttgtattccaaagcagaaatcagcttgccttgcaggtcaggcgcaaaatatagcctttctttgattttcttatttaggtgaaagacatccaagaaatgctcatgacgcttgcatagccctacaatgtcatcgaagtctgttttggcatatccagcaccgccatcggcgttgctaagaattacagtatcagaaagatcataagtattggccaggtactccttggcttcgttcagcgcatcaagtcggcttaaagaaacaaattccttggcattgattcgctttctgcgtttcttgcttatattgacaatgccttcacagacctgatagcgatgaaattccaaccggcttttagtgcctttgatcaccacgccatcgccttcaagatacaaaactgggacctttttcttagtgcctgcggcatcatatcttgaatctgcttcttggcccgctttaatatttttcccggccatttttaccaaattgcccacctgcatatggctaatattaaagccagacaggcaattgactgctagagcagtattgcgataagtggcaacgctgcttacttctaagatgtttttgactgctaaaatactgtagcgcttgtatttgtcaaagcccattaattcatccaagggataccttgcttgtttgcctgggcagacatatcttcttctgacatacctaacttcgccaaaagccatattgattgagcgctcattcttcttatcaatctgatagccctgtgctttaaccttggtaatcatttcatcatcaactttagctaaagccaaggccatgatttccttaatcaggtttaagaagaaacagattatttttctttcacgcttaatataattatcttcagactttataatatttgcgatttcagttacaattgaattcataaaagaccagcttctaatgtgttttttgttcttaacatcagactactggtctttttgtttgagctcaagtccaaattcaaaggacttgggcttttttaattatttattcaacttaccgtaaaaaattatacacttaggcaacagttaggctatgaaggaacgtattgcttgaagagttcttctgctgtgtgatattggaggattcgacgatgtttgcggttaatggcatcagttgcctgttgaacataagcagctgacttatctttcatgcttttgcccttagggaagaattgacgcagaagtccattgcagttctcatttgtgcctctttcccaaggagaatatggatgagcaaagtagatctgacatcctttgattttggtcatatccgcaaactcagaaccattgtcaaacgtaattgatttaaaccaattaggatgtctgtcaatctccttttgaagcagtctttgacaagtactggcccgatagtcaggaattttgataacaacctcaaaacgagtggttctttcagtcagtgtcattaaggcaggttgatttttacgtctgacgcctttaaccaaatcgccttcccagtgcagggaaacttttctgttttcaacttctttaggccgctgttcaatcgaattgccaagattctttttatgcggagcatggccaccatgactatgatggcgtttgtttcggcgtcttttaagcttcattggcaggtcgatattgcttatatccagcaatccttgatcaatataacgatagacagtgggcgtgctaggacatggataatttggcataatcctgtgaaattcaccaacgaattcatcaatgctggtggcatcaaatttggctttaaagcgtctgcttagcattctgaaaaagacggcatagtgttgcagtggattacacttatagcagtttctgcggcgcttttcatgataaatttgtgcagtatcagcgtaatagtgctcatacaagacatagctgctgtctctttgcaggacactgcctcgtctaatttcacggctgatagttgatttatgacagcctacttcttgagcgatagcagtgcaggaggttatgccagaatcaagcagagcttgaatttgtccacgttgttcgctgttcaattgatgataatgcttggaaatgctagaatttgagttggtcatgaagatcttcctttcttgatttttggtcacttcaagtttaggtcttcatggcctttttgtttaacaattagtgttgcacttcaattttaaatccgggtctagtatccttttaataaatattttttactatgttcacatatgaacaataaatttaagattatctctaataaaaccgattttaggatttttttgaataaatttgctttatttgtttaaatgcagtttcaaaaccatcttttagagtattcaagccctgcagttctaaagcggcccacatcaaccgtaaattgcgatcatcatttgtttccaaaaaatttaacataaaatgcatgtatttgtatcttattttttcaaaagcaaacctgtctgtaatatctaagccagaaattattgcatctaatctttttgccttctttagatcttttttaataagaatatattctgcattaatcaaagtatttaaaatagctgtagaaaatttcgaaactgtcaaatcttttgtgtaaatagatctttctcgtaaattgattttttaattatttatttaatcaaagtaggattctaaggtgtcctgaacctgaccaaagcctttatgaattcgattgaaataacggtcattgtagctcattgcctgaatgccaataaaagcatcaagcgactgttcagttggaaactctgccttaggcttagctttgcgcttgatcacattgttaaatgattcaatcatgttagtcgaataaattgaagctctgatctgcttgggatagttataaaagaccagcagatctggttctatgtctttcaagcttctgataacatggctgtaaaccttgccccatttggtatagaagtcatgcaggacagctgtggcttcttctttgtttgtctgttgatgcacctgtttgaattcgttcatgatcttttcacgatcgtcgacgcgtactttagcgcagatattgcgcatgacatgaaccaaacagcgttgaaaatgagctttaggataagtcctggccaaggctgttttcatgccaacaacaccatcagaaagaaaaagctcaacttgctttaagcctcgggatttcatgttttgaagcatatctgtccagacttcaatgttctcgctaggcgcaatgcagtagtcaatgacctccttgtgcccattaggcttgatgccaatggcaatatagactgcttcacgctcaaatgtttctcggcgcaaaggaaggtatgtcgcatccaaatagacgcagaaaaacttgtcgcttagcttgcgtttgtggtaagcctcaacctttggaatcatctgcttggaaatatttgatacctgagctggactgtaatggctgccatacatcttttcaattagatcggctatttccctggtggtcacgcccttggagtaaagcttgataatcatgctttccaagatatccgagtgctgcttgtagtcaggcagcgtgtgctgatgaaattgaccgttgcgatcccgaggcacttgcacttcaattgggccaaattgcgtatcaactttgcggaaataagcaccatttctagagttgccagtattccagccatttctggcatagggatcatagcccagaaaggcagtcaattcagcttctaacaagttattaacagcctgttgtagctctttgcgcaataaatcatttattttgtctggattgaatagagcttgagcaaaatctttggtaaaatcattcatgaaggagttcttctttctgtatgtgtttttttgttcaaaccaatcatacgagaaaggaactcctttttctaatgtttaaagaaataaatttaaggaatcattcatccttacacaaactattttacagtctcaaaatttcatttccaaatcgttattatttttaaaatagaaaactagtgaaaaagataaactataaatagttcttgggctaataagattctgagtattaccaaagaagtacacatcatcgtaataccaaacttcatctccagataaaatttttgaaaagtacatcgataatctctttttatagttatctgtaaaaatatccactcctgtaagatcgtaataagcattacaataaatggctgcttttaaaaaagttcgtttatcgaaactgtcattttcaacttctgataacaattttttagattgcgtttttaagtaattaatatcattactttcatatgcttttgaaacttctaaagttatattttttagataattcgaaatattattattaaagaaatctattttttggacatgaattacttcgagtagtttgaatactttttcaatatctaaacctgcttcgcctctttcccatctttctaattttgaacgagaaatacctactgcttccgcagctttactacttgaaattttggttgcctttcttaattttctaaattttctaccatatgtttctttcataacccactcctagttacgttcacaaataccttcaaaataatgatccagataaaggactagttttacctccttaatgatgccttaatgcaataaaaaatcaaactcataaatattacctaaattttcatttagcgctactaaaaaagcctaataccatcatcaagggtattaggtctttattacctaggaaatactaacgtacagtttccaaacaatatgattttttatgacagtttgggcaacgcaattttctagtatgtggcgtgtgtgccgcaaacataaagcttttaagttctggaacaaatttgtaatcgcaattaggacaaatatatgccactttttgataataatttttaagtaacacgaatgacattgcaatcaagcttactactaaaatagctaccgaaatataggctgcagtgttcatcttattgatgatacagtacgcaataaatgccataccgaccaattcaacagtgatttctactgctgacaatttccacattgaacgtgttacctctttgtatctagtttcattattcatgattttcgtaatgtcagtaacttccgcaatattattgggtttacttagaaccttttgtagttggataattttcttgttttgctcttctaatttttgcgtttctgctttatttctttttagttgatcttcaagcaaaagatcgattaatttatcaccatttttatcttctagtattttttgaatatcctttaacgaaaagccaagctcctttaaaaagatgattaattttaattgttttacctgctcatcagaatataaacgatagccactttcactaactcgactgggtttgaccaaacctttttgatcatagtaacgaatggttctagtggttatgtttaacttctttgctagatctccgattgtgtattctgacattactttctcacctcaaaacttaaatatacgggtttacgctacgtcagagtcaagaataagctaaattttccgtaaaaaacttcaaaaagcaaatattttgctcttttcctattgaaattattaacattaactgtataattttaagtgaatgttcactttatacaaatttcggaggactaaatgaacgcaatcagtaatttctttcatttaaaggagaacaatacctcctttaagaccgagcttttagccggtttgactacttttgtaagtatgtcatacattctgttcgttaacccaaacgtcctaggtgccagcggtatggataaaggtgctctattcaccgttactgcattgtcggctgcctttacctgtatcgtaatggggcttatcgctaactacccaattgcttccgcaccaactttgggcttaaacgccttctttacctatactgtttgtttaggcatgaaggttaagtggcaaactgctttagcagctgttttcgttgcatcaattctgttcattttgttaactgtctttaaggtacgtgaaatgatcattgatgccatccctgccgatattaaatatgctatttccgcaggtatcggcttattcatcgcctttatcggtttgcaaggtggtaagttgattcaaaacagtgattctaccttagttactattggtagtctcaacaaccctactgtttggatcactatctttggtttaatcattactattttcttaatgattgccagagttccaggtgccatcttcatcggaatgatcgccgctgctgtttttggcatagtgactggtcaaattcccatgcctaaaggcgttatctcttcagttccaagcattgctccaacttttggtcaagcagtcttccatattggcgatattaataccgttcaaatgtggatcgttgtctttacattcttacttgttactttctttgataccactggtaccttaattggtttggttcaacaagcaggtctgatgaaggacaacaagatgccacgtgctggtgaagctctagcagctgattccagtggtatgttggtcggttctgttcttggtacctcacctgtcggtgcctttgttgaatcaagtgccgggatcgctgttggtgggcgtaccggtttaactgccgtttgggttggtattttcttccttatttcaactatcttcagtccaattttgagtgttttcactacccaagttacggcaccagctttaattattgttggagtattaatggccgaaaacttggcacacgttcactggactaatcttgaaattgccatcccatgtttcttaatcgcattgggaatgcctcttacatactctatttcagacggacttggctggggtttgattgtctaccctgtatcaatgatcgcagccaagcgtttcaaagaaatcacgccaatgatgtggattttgtttattgttttcgtaatctacttcgttgttttaaatgtaaaataattctatcttataacccccttatcttacttttacattaatatataccctcacgcgtggtgctagttaaatcgttctagacaataagccaaattataagctaaaattgcaatttccaaccggctttgaaagcctatcagactacgtgctcgattgttctcggcattgtaataggtcagaagcgaaaagtcgctttcaattgttctgcgaatagccatcaattgatgatcattgtgctttttagctcttgtcatatttttacgatatggtgtccaaagttcgtaacccatttgttttagctgttgatgcagttctttgcctaaatagccttcgtcgccaagaagatagtaattagatggatgggtattttctatcagttcaactgtctccctggcatcatgaactgatgcctttgttacgacataatcaagaatgtaaccgtcatcgctaacaatggcatgaactttgaaaccatagaagtaaattttcttggtggccttataaccaatgttggcataaccgcgaaaaattttagcacgatagttgcgaattggttggcaaacaggtaccggaaagctgtcaatgatcaagaaatgtccattcaggtcaacctttttattcatttcttgccgtatctgataaatcaattgcaatagctgacgtgaacgccgattaaaacgtgagtgtgataaacaattgaaacattcacagaatcttctttgtgattcaattcctgtcttagcttgccagataagtaaagccaaaatcagactgtccgtagttttaatttgatcaatatttcgccgatgagtaaactcagccggtgcatacaaacgataccagtgccgacaaattatcactaaatctttaaaactaacttgtaaatggtggctaaaacgcttaagcttaaggcagttcaatcagatcagactcttttctattattactatttacaagtcgagtctaacaagattggacttttttattaactaaaacgatttaactagcaccacgcgtataccctcatctaaccaagtagcatgtctacttggtttttatgctaaaaagatgtctgttaatagtatggatgatgacagcagattctattagatgatataataatcaaagaaaggctgtgactaaaatgaaatcatataaaaaaattcaagctaatgttgactcctcactagcacttcaagcagaaggaatttttcaagatatagggctcaataccactaccgcaataaatgtgttcttaaagaaagttgtggcaactggtggtatcccatttgaattaaaagaaactcctgaacaaaaagcctcaagagaattaattcaaagcatctcaaaaattccccacaaagaagctaaaaccaaaaaggaaattgaggattggctagatgaggactaatgatattgtagatatttatgttgcttacattgataagcctggaggaaaaaataggcctgtattaataattaaattactaaacagtaaagcttggctgctaaaaatcacttcaaaatataaagaaaaaagtgaaaatatccgaaagcattactttcccatttttgactggaaaaaatataatttagataaaccatcatacattgatactaaaaattatttaatagttactattagtgatttaaatatcgaaaaataccgaggccatttctcaatagcagatttacgcaaattaaaagattttattgacgaaaattcaaactaagaattaaactatatgttttagttcctaaacacaatctcaaatatgagattgtgtttttatttatccaaatggcatcttttgataatcatttgacgccttatgatgttcggattcttctaaattgccgctatactattttcaacaaatcgagttatgaaagatttatttaggaggaattcattatgacaactcaagaaggaaaaactgctttaattactggttcatacggtgggcttggtacccaattcgttaacattcatgcttcacacgggggtgacctaatcctagttggtcgcaatgctaagaaattagccgatcaacaaaaagaagcccgtagaaagtacaacgtaacggcgcatattatcgatgttgatctctcacaaccagatgctgcgcaaaagatctatgatacttgcaaaaagaacggttggactattgactacttaatcaacaatgctggctttggtggtcaaggcgaattcattaaaagaagtatggaacaagacatgtccatgatcgccgttaacattgaaacgcctactcgtttaactaaattatttttacctgacttcgtaaaacgcggccgttatgcctggcccacttcaagccgtttactacgctactaaagcatacgttacaagctggtcaaatgcgttatggcgtgaagtacaaggcacaggcgttacggtaagctgcttaatgcctagcgctatgcaaaccggttttatcagtcgtggtgatttgagttcaactcaattattcgcccatgcggttagtccataaggtgttgcaaaagctgggtatgaagaaatgattgaaggcaagcttaacattaccgctggtttaactgcagcccaaaaaccattcatgaaattggaaccaatgttacctaagaagatgctcatgaacaatgtttataagatgcaagaacaaggtagtagaaagtaatcaacttatcttataatatggatcaaaaggatggtatttgaatgaatcactttattttagatggtcgctatgaagacctactctcttttaacgttgaagaagcacttaaaaaagccaatattcctgaagattgtttcaaaaaccccatccttcaatgagtgaacaacaatactacaattttatggcggctattggtgatcagattagtgatccattcactccaattgaaattgcaactacaaatccaattgaatctttctctccaccaatttttgcggcatatagtagccgtaacggagatatttttatcaagcgtctagccaaatataaaaagctgattggcccattatcttttaaaattgatgaggatagcaagcagctctctattaccctaactccaagtaatcagcaatattccctaccctcttttctagttttatcagaatttgcatttttagtgggacttttgcgcaagacgaccaaagaagctatttccccgctgaagatcacaatgacatcccccgtcaatgatgagcaggtcattaacttctttggctgcaaaatcgaatcgggtaaacgcaacaccatcacttttgccaaaaaagacttgcaggtcaattttattagttataactaagcaatgtgggattatttcaagcctgaattaactaaacgcttatctgaattatccgttgatgattcaactagtgctagagtacgtagcatattgaccgaattacttcctaatggtgaatttacaattgacgatgtagctaaaaagttaggttattctaaacagactttacagagaaagttgagtagcgaaaacactacttttcaaaaacaactgaactccacccgagaagttttagcgctaaattatttacaaaacaccgatatgacaactagcgatattgcttaccttctaggctatcaggaatttaattcgttcttacgtgccttcagcatctggaaaggcataagcattagcgaatatcgtgaaaaaatgaataaataataaaaagcagatatattttctgttttttttactttataaaggaaataatatgagatttttgctataatttactttataaaggaaataatatgaaaattgctaaaaatttactttatgaaggaaataatatgcagttaaatttaattaaccgcccacagtatttaaatcaattacttcaatttcaaaatacagaattcatcaaagtactgacgggagtacgaagatcaggcaaatcttatattttaatgctttatcgtgaatatttactcaaacacaacataaatgaacatcaaatcatttatatttcttttgaagactttgataatatagatctttatgaacctaaaaagctttattcatacttaaaagaacgaattattagtgaccaaagaatgtacattctacttgatgaaatccaatatgtatcagattggcaaaaagtagtaaatagccttcgacttaatcctctacttgatatcacaattactggcagtaattccaatctattaagtggagaattagcaaccttactatcaggaagatatgtagaaatacatgtttatcctctttcttttaaagaaatgctagattttaaacatatttctgaaccatcagagcgtcagattgataacttatatgatgaatacattaaatatggtggtttccccgcggtagtgttagcaaaagaagaattaaaacaaactattctttctggaatttacaataccattattgtcaatgatatcggctacaaaaatggattaagagaaccagaattagttgcattagtagctaaatatctagcagattcgattggtcaattaattaatccgaacaagattgtaaatacactaaaatcagcaaattttgatatctcttataacgctgtgcagcgttaccttaaatattttgaagaagcatatcttttttataaatctagtcgttatgatattagagggagaaagattctttctactcaaggtaagtattacattgtagatactggtttgcgtacccaagctttaggagaaagaaataatgaccgcggtagtgttttagaaaatatagtttatgtcgaattacttcgccggggctacacagttcaaattggtaaattagataataaagaaattgatttcatcgttttcaaggtaaatgataaacaatatattcaagtaacctaccagcttccagaaaattctactagagaaactgataatttacttcaaattccaaataactacaaaaaaatagtcatcactggccgatatgaaaatgaagaaatgatttccggtattccaataatcaatattaaagattggttattaagctctaaaaactgatcaaaataggatcgactaactcatgtcgatcctatttttaaattaaattatgttttttacaataagtaaaaattccgtcatcttgcacgctgccacagatgtcatcagcaatttccttcacatcgtctgttgcgttccccattgcaacgccgtgaccaacagtctttaacatttcaatatcgttgccgccatcaccaaaggctattgcttcgctcacagggatttgataataatctaacactttttcaattgctacacccttactaccagtagctggaataatatctgctgctctatcccaccaagctgttaccttagcattttgcgtattagctacaagtccgtcataatctttttcacgacagcctaccattatttgataaaccgtatcctgatcgacaaccacatcaaaatctggcgccactctcaaatccgttccaccaatagcaaagtattcctttaaatcctcatcaacaccattagctgcaatccgtgttttggtagctacagctaacggccgatttattttctgagcattttgaatcatatgcaagacatctccttgccttaacggattatcaaaaacaatgtcttgatcgttatagcagtaagaaccattaaaagttaaatatgcatcaaaatctacacccaacttaggcagttgcactggtggtctgcctgatgcaatacaaatcataatgccgttgtcttgtaaagcatgcagtgtctctagcattttaggtgtaattgattttttcttttcaattaaagtaccatctatatcaaaaaatattatcttaggtttgctcattatttttaccttctaaagaattttctactaattattatactttaaccgatatttcccaggaaatattaaaattgagctctcttcctcaacatctgtgctaaactagatacaattagtttctttaaaagttaatagttacggaggaatttttaaatgcagacattggaaaaagtctttcatttacaagatgctcataccactgttaaacgtgagttaatcgctgctttaaccacttttgtcagtctctcttacatcttattcgttaacccaaacattttgcacgcagctggtatccctaaaggtgccgcttttactgtaacagctcttgccacagcagttgggtgttttttaatgggttttattgctaattatccgattgccttagctccaaccttaggtagcggtgcctttttcgcttataacgtatgtgttgggatgcatatttcttgggaaacagctttggctgcagtccttgttgcttcagttttattcattttaattactgtctttaaattacgcgaattagtggttaatgccattccacaagatatgaagtatgctatttcagcaggaattgggttattcatcgcttttattggcttaaaaaatggtcaattaattgttaacagcgattcaactttagttactctgggaaaatttagtactccagcagtttggatcacattatttggcttaattttgactgttgtattaatggcattaaacgtgcctggttctatctttattggaatgattgttactgccatcttcggtatgatcattggtcaaattccattaccacataacatcgtttctggtgccccaagtattgcaccaaccttcggccaagcggtttttcacattaaagatattaatacagctcaactttggatggttgtactaactttcttattagttaccttctttgatactgctggtactttaattggaatgactgaacaagccggtatggttgacaaggatggcaagattccacggatcggtcgtgcttttttggctgattcaactgctatggttgaaggtgcagtctttggtactgctccacttggaacttctgttgaatcaagtgccggaattgccatgggtggtcgtactggtttgactgctatctttgttggtattttcttcattatcagtatgattttcagcccattgttacaagtaattccaactactgtaacggctcctgctttaattatcgttggtgtactgatggccagcaacttaaagaaaatcgattgggaaaagttcgaaattgcctttcctgcttttcttaccgttgtagggatgccactgacttactcaatttcagatggtttggcattaggcttgattgcctacccaattaccatgattgcttctaagcgttataaggaagttagtcctatgatgtatatcctgttcgtagtatttatcatctttttcttagttacgaatttataaaaagaatgctaaagataagcagtttgaagctgcttattttttattgacttgatttttattttgtactactgtaataaatatataagacagtttttatgggagaagaaaaatgagactgtaaaatagtttgtgtaaggatgaatgattccttaaatttatttctttaaacattagaaaaaggagtacgcgtggtgctagttaaatcgttctagacaataagccaaattataagctaaaattgcaatttccaaccggctttgaaagcctatcagactacgtgctcgattgttctcggcattgtaataggtcagaagcgaaaagtcgctttcaattgttctgcgaatagccatcaattgatgatcattgtgctttttagctcctgtcatatttttacgatatggtgtccaaagttcgtaacccatttgttttagctgttgatgcagttctttgcctaaatagccttcgtcgccaagaagatagtaattagatggatgggtattttctatcagttcaactgtctccctggcatcatgaactgatgcctttgttacgacataatcaagaatgtaaccgtcatcgctaacaatggcatgaactttgaaaccatagaagtaaattttcttggtggccttataaccaatgttggcataaccgcgaaaaattttagcacgatagtttcgaattggttggcaaacaggtaccggaaagctgtcaatgatcaagaactgtccattcaggtcaacctttttattcatttcttgccgtatctgataaatcaattgcaatagctgacgtgaacgccgattaaaacgtgagtgtgataaacaattgaaacattcacagaatcttctttgtgattcaattcctgtcttagcttgccagataagtaaagccaaaatcagactgtccgtagttttaatttgatcaatatttcgccgatgagtaaactcagccggtgcatacaaacgataccagtgccgacaaattatcactaaatctttaaaactaacttgtaaatggtggctaaaacgcttaagcttaaggcagttcaatcagatcagactcttttctattattactatttacaagtcgagtctaacaagattggacttttttattaactaaaacgatttaactagcaccacgcgtaaaggagttcctttctcgtatgattggtttgaacaaaaaacacatacagaaagaagaactccttcatgaatgattttaccaaaaatatggctcaagcactattcgatcaagacaaagttaatgattttttgcgcaaggaaattcaaactgcagttaatcaattgcttaaagttgaattgactgcctttctgggctatgatccctatgccagaaatggctggaatactggcaactctagaaatggtgcttatttccgcaaagttgatacgcaatttggcccaattgaagtgcaagtgcctcgggatcgcaacggtcaatttcatcagcacacgctgcctgactacaagcagcactcggatatcttggaaagcatgattatcaagctttactccaagggcgtgaccaccagggaaatagccgatctaattgaaaagatgtatggcagccattacagtccagctcaggtatcaaatatttccaagcagatgattccaaaggttgaggcttaccacaaacgcaagctaagcgacaagtttttctgcgtctatttggatgcgacataccttcctttgcgccgagaaacatttgagcgtgaagcagtctatattgccattggcatcaagcctaatgggcacaaggaggtcattgactactgcattgcgcctagcgagaacattgaagtctggacagatatgcttcaaaacatgaaatcccgaggcttaaagcaagttgagctttttctttctgatggtgttgttggcatgaaaacagccttggccaggacttatcctaaagctcattttcaacgctgtttggttcatgtcatgcgcaatatctgcgctaaagtacgcgtcgacgatcgtgaaaagatcatgaacgaattcaaacaggtgcatcaacagacaaacaaagaagaagccacagctgtcctgcatgacttctataccaaatggggcaaggtttacagccatgttatcagaagcttgaaagacatagaaccagatctgctggtcttttataactatcccaagcagatcagagcttcaatttattcgactaacatgattgaatcatttaacaatgtgatcaagcgcaaagctaagcctaaggcagagtttccaaatgaacagtcgcttgatacttttattggcattcaagcaatgagctacaacgaacgctatttcaatcgaatccacaaaggctttggtcaggttcaggataccttagaatcctactttgattaaataaaagattaaaaaatcaatttacgagaaagaactatttacacaaaagatttgacagtttcagaaaaatgaaaatcaaaaaagtactactgaccacgtctttactcacgattagtttgattactctatcgggatgtagtttccacctgtttaccaacaagaattccggtcctacaatcaaacgaactttgtcctctaagaaattcaattcacttaaggtagccagtgacattactgatgttgaattacatgcaagtaatcaatacaaagttatctatcatgggctcaagcgtttcaaacctagcgttaatgtgaaaaatggtcagttaaagatcactcaaactagtaatggtgtttcttataacatcaaagaaggcaatacagtggcaatctacctacctgccaaagaattacaaaatatcaatattaatctttctgatggcgatatcgatgctgatggcaaggttcaagcaaaaaatgtcaaacttcacagtgacgatggtgatgtcaactttgacgatttaagaattagctctggcaaaattacctcagatgacggcgatatttcagtttctaatctacttactagaaaaggcgccacagttgaatcagatgatggtgacattcgtattagaaagagcaatgccagtggttaccgcctaacttctgacgacggtgacgtcacattcaagggagatacttctgataatgatgacggtggttcttactacaaaaatactaagagttctaacctgctctctgctcacagtgatgacggcgacgtcaacgttaactaaatttcgtcataaggcgataagtttcacatgaaacaaaaaatcaatgcatcattgataatgcattgattttttacttttttcctcattcatagcataaacacgactttacaagattatttaagtttctattgaaatagacataattttaatacgaaaaagataagactaaattctacttttccattaaaaaatatttaccaattttccattttctaagtcaaaatgatgcgtaaatttcttcatcgtcgttggtgaaatatggtggtcaatttcaattactgttaatggcgaattcaaaaagacattatgaatttgctcagcagtttgcggatcaagtgaagcagttccttcatcaactactaaaatttctctttggaatagaaaggcacgcgctaattcaattctttttctttccccacctgaaagattatgcccatttttttcaattacggtatctaagccatgtttttgaacgtaattagttaatcatgcttgttgaaccgcagccatgatttgtttttgatcaaattgtttaccaagagttaaattaaatcgtaaagtctcattgaaaatttgcgaagtttgttgaacttcactaaaaatttgcgtttcaacagactgattattaaccaaaactcttcccttctgcggagataatttacccattaacaccttaagcaaagtagatttaccttcaccggactttccagtcaacagaattttatcccctctattaacgcataaactcacatcattaagcactggactatcagcttgatagccaaaagttacattgtccacatctaattgctcaaatttgattggagcctcatcttgcttagttgttaaaggtttgaaagacaacaacttagcggtcattggtttagtggcggcaatctgattacgaatactattaatactaaagaaactatttacaatccaagcactagagtattgcacggccacaaaagaagccaaagcaacgtgtccttgaattaccataataattccgactccaatcggtaagaagtctagtgagtaagctaataaattaacgtaaaaatcactcttagcaattgtatcgtcacgttcacgtttattctcaacagaatttttgattactttactactcttttttacaaatagagataatacattgtaatttaaaaccgtattgatatttttgagtaaatccgacataaatgttacataactacctgttgatttactccaatcggatgactgcttggctgttttcttgctaaacaaactaggaataaagcttgaaagacttgcaaaagcaacgaagactaatgtcaagactacactatttatcagcgcaatagtaacgatcccaacgattttaaccacagtagatactagtgaaaataactgtctaaagtacttttcttcaatcaagttaagatcattattaatgaaagaaattcgattagaaatttctttttctcctgtttttacaaaatccgtttgcatcaaatgctcacgaaccttttgattaaatagtgctacgttacgattaattactcaattatttaagtattctacaattacaagtaagatttgtaacactgtaattacgataatcattctcaccgtatttggaatacttttccttgtaactaacgcaaagatttcggagtatgaccatgtgctaaaaggcaaagaagtccgcttaaacatgacagaataatactgagcgaaaaccatttgaggtcaataaactttttcataaatgaatctccctttcaattaagttggattcattatctgctttagttcacgataaaaatagctttctgcaaaagtgatcttcaatctgcatatatgcagattattctggaagaatagacagaatattttctaaattacttgccttgatcaatttcttaatagctaatacctgctctgtatctccagcaaaatagcattgataaaaatgaccaatgattttatataagactaaagatggcgtttgacttaattgcccaagtaaataaataggctctttattatcttttacaaatttattttcagcacaagtatataaataattcacacaaatagtggcaattgttgtttgcattttttctgtctgctcagacattttatcattataagtagtgaaaattttttgaaagaaaaaagcaaaatcgtcatgagtaaagatagaggtaccaaaattggctaacaaatctaaactaaatttatcttgaagccaattgtcgcctgcaaacaagcgttgcagtactatatttttatctttgacatcaaatttacgttttctttctagcaaggtaagaatcaacttagctttgattttcagaagatcatgatgcggcagttgttgaatttctgttaccaattttctaacttggttaaagtcttgattataataagcagtctgtaattgatcacctaaattgttttcatcgtcagcttgtgcgactgaattttgcttaaagaattcatcaaatgaaattttatttttctgcaaaattgccattaagtccttagctgatatttcatgcaatccgcgctcaatcttagaataatgggcaggtgataaaattcctgttacaaattgttcttgcgtcagtccccgcgattggcgcgctttttttaatgctgtgttaatttccatagctgtttttatttcaatttacggtcccttttagatacaaaccaaattgtcccatcagaagttgcccagtgtccatcagaagttttatgaaatttcagcgtcagtttcttactgtgtagtgtccagctatttttaccttccattgtgacacggacccggcctaatttttctgaatttattttgttattgtagtctttgggatcatatgaattatgcccatatactttataaattgcttttgctgccgcagtatttggcttaatgtatttataagtaccagatgcatcagtcttaaaaactgggctggatgcatcgatttgaccactatttttccccagagctatgttcaccaacatgccaagatgattttccattacagaatctgtttgatggggatcataggttgtaagatttttattagcaaactgttctggaatagtttgctgattgcgataaaacaaccagccaccgactgccagaactacgactactacaacagttatgattgtagctttctttttcataaaggatcacctgttatctatcagcttttttctgaaaagtaattaatccgtgtgaaactaatctaacagttccgccataataaactacccaacgtactttgccattactgtactcttcatacattctctcccgctgaagatatccattatatgtaccatcattataaggaatttccatcggagtatctacagcaccatcataagcgccataacgcgtcttatgccatgggcctgttctcttaactccatgaacttttttagttaacggtagtttttgaacgttttgaactgaatctgtactagattccgcagcagatacaacagcagtattagtggttgcaaacagagcagttgctgagaataacactaaagttgcttttcttaatttcatatctaacaccttatacctttcttttattgtttattttcattacctagttgttcattatcattgacaacaaaatttgtcatcattttctttttacttgctaatgtaggaattgggtagcttttaagtttagtattatacaaatagccaccgtacataattcctgttggattatgccccattggaacagtgtacatcttttccagatatcctctaaatacctcattgcctcttcttacagtgtaataaacataagtaccctgatcatgatagtattgacgttgataccagatatgttcaacaaatccttttgattcagtgctttgtgttgcagcttgtacatggtttgattgaaccaaagctgaagttgaaactgatactagtgataaagctaatgctgctttagctgttaaagttaaaattttcttatttcttttcataactttaacctactctttttttcttttcttgctttaattactacctaatccagacggaataggaacccatggacccatatttttctctcctttcttatttatttttcattaattttactttcactactaagaactgttcagaaattgtcaaagatgacaattttctacaataaaattcttaatcaaatgagacattccattacttttcataaattcaataatctgatctacttcttcatttttgccatcaaaacaataatggtaataattggcaactattttagcaaaagcattacgtggaatttctggcaatttagaaatgaaatcgtaaattagatttaaatcaattttccttctttgtacgtatacattagccaaataattaatagctattgctgacattatttcttgtagctgaccagacagattagatacattatggcgatacgttctaaatattgaattaatcaaaaagtccatatcttctggggcatatatcatcatagtcattgcaaaaatttgtagagtagattcactccactcatcagaatcaaagacaatttgtctaacttgtcgtttaatattctcagatatttgatcaatttgtttctttaaagatgctattgaaaataccactaaagcataaagattaaatatattctgactttgatttttatattttccaatttcaattttcaaatcttcaagtcgttcgatctgctgatgataatatgcatcttctaattgcttttgccagatcaaatttttgtgagcaagatcattttcactatcttcattttctattcgctctaaaaatatagaagcttgcaatccatgttgctttaacaaatcaattaaatcctgagtctgaatatcatttaatccacgttcaatttttgaatagtaagatgttgataacacatcccccgccatttcagtttgtgataatttcatactttttcttgtttgttttaatgcttcaccaattgtcatatctttccctccctcgtattatcatatttttcattattgtataatgttttgttaattttgcaatagtttgtaaaacaaaagcattatttttatttttcaatcttttatgtttacaaatgtaaacttagcaagtagaataaaaaatgtgaagagatgaaaataaattatttaatttggaggttacggtcatggatgtaactaaaatcattatccttgttgtcgcaatcgccttgatcggctttatcctttggtggttcttcggcaaacatgacgaagctatcggtaaagcaagtgttaatcaaggcacacaagaagctaacatcgtcgttaacggcggttactctccttctaccattgttttaaaacaaggcgtaccagctaaggtgaattttgatatgcaagactctaccgcctgcttatcgcacgttgtttttgaacaacttggcgttaacaaagatttaaccaagcaaaaaatcactacaattaatatcccgactgataaaaaaggcacttataacttcgcctgcggaatggatatgtttcatggaaagattgaggtcaaataatgagtattttttcaaagaatcaaatcaaaaaagttgtcgttaatgcagataatcacggttacaagccagatgtagttaccttcaagcaaggcaagcccgcacaattgaaatttatcccatcagataatatgggctgcatgaatgaaattgtatctaaagacctgggcttcgatcataagctcgatggtcaaaaagaagttgtggtagacatccctaccgaccacgcaggaacttataattacgcatgtggcatggacatgtttcatggaaagatcgtagttaaataatgaaattatctaatattcagcgtttctggatctcctttgtactctccatcccgatgctcattcagatgattgccatgccatttcactggatgatgccaggatacaactggattgcccttattacgacaaccattatcatggcaatctcagctgcaccatattgtaagagtgcttggggcgccttcaaaaagcataacgctaacatgaatacgctagtggccgtcggtactgctgtggcttacttttacagcatctacgctatgttcactggccgcgaagtttacttcgaaagtgctgcttatgtaacggtctttgttctacttggggatgccatggaagaaaaaatgcacagcaacgcttccaacgcactagccaagttagtcgacctacaagctaaagacgcagcagttttacgttacggtgaatttgtcaaagttccactcgaacaagttaagccgggtgatacaattcgcgtaaagccgggtgaaaagattccggttgatggtgtcatcactgatggctcaactaccatcgacgaatcaatggtcactggtgaaagtatgccggttactaaaaagaaaggcgacaatgtcgttggctcaacgattaacaccaatggtactttcacttttaaggctaccaaggtcggtagcgatacgatgcttgctcagatcgttgatttagttaaaaaggcccaaaccagtcatgctccaattcagaacttgaccgacaaaatttctaatatctttgtcccagtcgttttaattattgcaattattaccttcgtaatttggtatgttttcttaggcgcaacattggttaatgctatgctcttcgccgtttcagtagtcgtaattgcttgtccatgtgcactaggtttagcgacaccaactgctttaatggttggtactgcccgtagcgctaaaatgggcgttttaatcaagaacggtgaagttcttgaagaagttagcgacattgataccgttgtgtttgataagactggtacaattaccgttggtaagccacaagttactaatgttgtaggtgataaaaacaaggtcttaactattgcagctagtttggaagaaaattctgagcacccactagcaaccgctgtagttaaagctgctaaagaagcaaagactgaaattaagtctatacaaaactttgcagctattgaaggccgcggagttaaggcaaactatggcaatcaagaagcttttgttggtagcgatcgtttattagaagatatttctatttcccaggaaatgaaagatcaggctctccaacttcaaaaagaagcaaaaactgtagtctatgttggcctaggtaatgacatcattggcttaattgccattcaagatgtacctaaagcaagttctaagcaagcaattgcggaacttaaaaagcgtggtttaaagacggtgatgcttaccggtgacaatcaaaatgttgctgaagctattggccgtgaagtcggaatcgaccaagtaatcgccggtgttttaccaactgaaaaagccgctgagattaagaaattgcaggatgaaggcaataaagtagcctttgttggtgacgggattaacgacgcacctgcattgtctacagctgatgtcggaattgctatgggatcaggtaccgatattgctattgaatctggcggtatcgtccttgtacagaatgacttaatgggcgtagttagagcgcttgagatttctaagaagacctttaacagaattaaattaaacctcttctgggctctgatttacaacacgatcggcattcccattgctgcaggtttattcatggcctttggcgtgcagcttagtcctgaacttgcaggcttagctatggccttctcttctgtttctgttgtaactagttcacttttattgaataaaacaaaaattgctggtgaaacagctcaagtttcaaagtaaaataattctccgaccggatattttaatccggttttctttttgtaaatttttcaatttgcgacttaaagtttcagcagtaatacccaaatatgatgctaagtctttcttttttaactttaattccacatttttactcccctgtttttgagctaagtcttgcaaataggccattaagcgttcctgagcatccattgaattgcgccgaatagagttagtttcgattgtaaccagctgctcgccaaaattattaagcaaattcaatgctaaatctggcgtctttttcaataacttttgaaaatcacgacgctcaatagaacaaacataagtatcttgtaaagcctgcacaaagttttcctgggcatgttcttgaaaaagattctgctgtccattagcatcgccttgattcagcacacctaatacggtctctttaccgtcttcgttgagattgtaaatcttggcactgccttgatccataaaaagcattccgttcttaccatcacctggttgtcgaataatactgccttttggaaaatattcttggtgcgttgaaattggtactagtttttctaacatttcatttggcaaatttttaaatatggctgctttgcgaatacaagccatgggtgaatgttgcataaaagcctcatttcttgatctaagtcaatttatttttatctgcatcttaatacaatgtatttaacaactcaagcagaaaggaaatattaatcatgactaaatacatcgcacatattgagcctttaaacgctgaaaaaattggtactaaggcacacggtactgccacttttgaagaaaaaggtgatcaactacatattcacgttgagatgtttgatactccagcaaatattgaacactgggaacatttccatggcttcccgaatggtcaaaaagctcatgtaccaactgcagctcaagacgttaaccatgatggctttattgatttaccagaaactgagccggtctcaggaactacaatggtgccacttgatgatgccccagaaaacatgaatattcctcatgatggttatcctgttgccgacagtaatggacattatgaatatgagattgatgtctcattaacaaagctacaaaagaaattcaaagctgcctttggtagcgataaactacaactagacaagcgtgtagtttacgttcatggtgtacctgcagatctggaattacctgatactgtaggtggttgcgtaatgagttatgatgcccatactaccttgccaatcgcagctggtgaaattgaaaaagcttaagttaaaagccattccttgtgaatggctttttgcatcctttcttattttttgatagcatagatatagattatgtaaagtatctaagaaaaggagatgttttataagtaggcttagatcctactcttatggagaataacgaaaaaattatccaagaaaagaaacgcgaaaaatttattaaaactaaaaagaattacaagcgtgcaccactaatgtcagttcacttaagagtgatgatggccgttatcttaggtcaaatcgcctgtggctattccctgggaattagtggtaccgctctttctaatgcagctaaatatatcaacattagtgacttctggactggattaattggggctggtgctttaattggccttgctggtagtcttttggtcggtcgactttctgataaaatcggtcgccgtaaactcttaatgtggaatatgtatatattagctgctttttctttattacatctaataaccgctaattttagcttaacctttatcctccgtattggaattggtttaatgattgctgttgactatactgtagggaatgccttgttaaccgaatggctacctaagggtgaagacagcaagcgccagagtcatttattaatctactggactattggttttattttgtcttacctagctggtagttttatcactggatttgatagttatacttggcaaataatcttagcaacaagtgcagtacctgcactagtaactgctatcttcagaagtcttttcccactccctgcttcaccaggctggctagcaagtaagggtaagattaagacggccaacaaggtcattcgtaagcacatgggacgcaaatggagattacctgcccgctttatgaagcggaataaaaagaaaactcctagaaatatttcctgggcaattttattttccaagcaatatctgcgacgtactctagtaggtgggattttctatgcctgccaagccttctcatttttcggtattagtatcttcttgccaattttattacaaagcatgaatatcactagtggaaatatctcaggaattatctacaatggtgggatgttcattggtgtgctaatcggtacctggatctttaacaaggttagccgccgcttctatcttatcagtaattttctaatctcaggtctgctaatcggcattttagcaatagtacctaacttaaattcaatacttaaattaggtatttttacgttatttgcgattattttatcagctggtttgatcctagattatccttatccgactgaattatttgatctgaaggtacgagcaactggtgtaggtacttgtattacaatcagccgaatcggggctgccgcagggactttcttattgcccgtcttaactaatgtgggtggtgctagcctggcaatgctagtttgtgcgattgttttactctttgcctttatcgtttgcctcatctgggcaccggagacctcaccccaatttatgaaaaaataaaataattaatatgctacacaaaaagacagattacatatgatgcaatctgtcttttcttatttcttatcttttttcttcttgtccttagaatccttatttaataattcttctggatccttatgcttaggcgtcttctttggatctggtacagttgcaaagcgatcaagcatcttctgtaagttattagggttgtcaaaagttaatcccataaaacatcttcctttcgttttctcaattatattaaaatttcaattcaaatgacaataattttaaccctcattatcaataaattgttgcatcttaatcatttctgaaccagccagatcaacactaattaaatcactataatcatgaacactagtatctcctaaaccatattcagttacaatttttaggtcgaagccactatcagagcgatcttcaattaagcctaaacgatcaggataatgataaattgaatcactaattttcactatttgatcttcgggccaattatcaataatttctgctggtgactgaatttcatcccgtaatttaactgaacgctccagcctgtccggatcaaaactgccattatttttttgccattgaactaaaaaattaaagaagagcaagcgctcggaatcttcagtaatatgcgttatatggctcctagcaatcactgcaattgattcaacctgccctaactcattgatgctctcgaataccagattatcatcgtcatacttgagtactttaccaatagcaaaactaccatattgatcatcaaaggtataatcaaaataaatttcaaccagatccaagtcgttagtgaattcttgcttctgtgattgccgcaaatattgggtaaataagcgattatcaatggcattagtatcgacacaaacaatatcgtcaagtggtataacggtggcataatgctctaaagttaattcattgcgttctaaaatacgcacctcttgctgatcaagttgagtaattaagccagtgtaagtagcacctgtattcacctcaaaagttgtaaagggttgcgcgtcagctacgttaatcagtaaatcatgcagattagtaaaatcccaggctaacactgtcttatttaattgctctaagttaaatgaatccttaacttgggtaatcatataatagcgtagattaggcgtatcgtcttcaatcttagctacttgatcttctttaataaagactattccacctaaattaccgccttgatcgactgattcaaaggtaatccagccatgatgttgcgtgataatgcggccaatatagtaagaatttgcatcaactaccgtaatacttgcatccccacctaagttatatttttcttgatcagccttaagcgtgatttgtacaagtttattcaatttttcgccccctcttttttcttccgtgaatttaattgtcgcctaatcattatttttctgcaagaaaaaagaagatggtttagccatcttctaatattgagttaattctgtagaattttggggctaacgaatattacttcttttgtgcagctgcctcagcttctgctgctgtgtttgaaggggttaacgaagtactgtttggatcaaaacgcacatcgcttgcttttacataaccatcagcaaattggacttcaccttgattactatagacagatttaccaactaagtgataaaacagttctgccttattttcacttggtacccagatgtaaagcaacttatttaccttgtatcttccaccttgttttctaacttgatcgcccttgaagtcaatcttgtttccgttagcatcatagatatcagttggcttaataaattgaattagtgattttttagtatgataataattttgaactggaatatctttagcagctttaacattgaaattataaatccaataatcagttcccttaatatgatagattgctaattcgttgtcatcgtcaccatctctaccagtatcagcacgtgtcccttgctctaaacgatccactgtaaacttatcaccttgttttgcgtattttcctgaaggctgaactgcatctttatcaggtacttcaacaaaaagagcagcacgtttatcagttacagtaacagtcgtttcttctgatttagttgtttgagacgaagaagaactagtgttgttatttgtattaacactaattacaggacctaaattataagacttaatgtactgtttattaggtccacctattctaaagtaatgctttccgttcttaaatttgtatgaaccgccataagtcgtgatagtttcacccttatacaatttccaacggttattgtaagaggttctgccagttgaggtacgataaatgtaagtattatgagtaatcttacgtgttacaccatcaatgttggtagcctttatgtattgatccttgccgcttactttatagtaaagcgagccgtcaattttcacagggttgctttcaacagtgacatattgataggcattgtattttacacctgtgctgttaccatccttgtcgtaagctaaagcagtatgcataactgctttagtcgtagcagcttgtacttcattagttgtattagtcaaaacagccaagggtgcaactgtcattaatgtagctgcagaaattaatgcaatcttatttttcttcatcataatcatccttttcaaatctctacactgctattatattctctaaagctaattaaagcattaaaaagaagccaattaagtgaagtggacttctacttttgatattttcttttaatttattttttcaatgccgttgcctcagcttctgctgctgtgtttgaaggggttaatgtcaaacctatattaacaaatttaacatcactagctttaacataggcatcattaccaacttcaatttgatcaacgttacctgtagcatagaacttagtaccaactaaatggtagaataattctgccttgttttcacttggtacccaaatgtatatgagtttatctactttcagatttccaccttgttttacaatttttgcgccattgtggttttgcatagtaccgtcagcattatacacatcagtatccttgacaaatttgatatagccataatgttcgtgatcataatcatgctttactaattttttatcggcagttacatcaatagctaaaagccaattgtctgtaccttttattctatacattccagcttgtgctgcagttgatggaaaatgatcagcaaacggagtaacttctagtttatctacaataaacttcgtaccagctttgagattctttttgattgctttaccttgattatcataaatatttacaccgtaagcattttttacggtaacagttgcttcctcggcattagtattagtagcgttgtttgattcattgctggttaaatttgatgcagtattagtactaataactgggcctaaattatatgatctaatatattgcttacgtggcccacctactctaaagtaacgtttaccgtttttaaatttatatgatccaccatatgtagttacggtttcacctttataaaatttccatttcttactgttggcagtcataccataaggtgtcctttgagtagaagtccggtatatataagcattatgagtaatctttcgggttacaccatcaatattagttactttgatatattcatctttatctgtaactttgtaatattgacttccattgatagttactagttttggatctacatgaacactaccataaacgtaatatttatgaccggtactatttccatctttatcataagctaatgcgttgtgcataatagtcttggttattgaagaatctgcttgtactgtatgagcgctagttgtagtactcaggataggtgccgttcccattaaagctactacagaaattaacatgattttattttttttcattattaaccaccctttgaaaatctctatacttcaattatcttactttgtataaacttagacaacaaaaatagcatcaaatcatattgatttgatgctattaaggctaaaatttacaaatttagtcccaagctaattcataaaccttatttgaaacagttttatttttaccgttaacattagcatggtatgcaacagttaagtaaccgtgattttcatcaataatttggatactttcaacttcactatgttcacctgaaatatctaatccaccaaatgcacttaagtttacattttcccattgagattgatcattacgtgcataaaacggaatttttacaatttccttgtgatagtatgaccatgaaccattacttaaacttggtgatttttgactagtaatataaatattaccagaattatcaagatcataaccttgtacagagtttaaaacagatccatacaaaccatatactgtaaaactagtttcacattgataatttcccatatttacgaaaccattatttccagcctcatctaatgcattattaatgacatttaggtcataaattgaaaagtggcctgttccattattctcaatagtagcaattaaaagcatactataatctggtgaaactgctacttcagcgcgttccatttcatcaccagagcattgatcttcaggattacctgcgcggttcaagtatgctaaacgtgggaattcagtatttgatgaagcatatgatttgtatctaatatctgctcgagcaatttgagaagcccatttattcttgtttttagtaccaacgaaccatttaccagatctacctgaatattcccaagtttgggtgtgtccagctgctgcacctactaaagtaagcacaggggttgtcacgttgccacggaagccacgcaatacatgtgtttctgtctggttatttcttaactgtaaaccataaacatactttgatcctacattacctttttgaactacagctctgtaacctgtattcatatcgaatctatctaaaattctaatatttgttgcatctaacataataaaacctccgaaaaatttaaaaactactacttatcctgagtttgctcattcatctgtttagccacttccgcaaagatgtcctgcacttcttgcctgttcagcttgaagccttttgcttcaaggctgttcactactgcgttgccaacacggttaatcttctgttcgtcagaaagattttctttgtcgtataagcgtacatagcttttcattaagctatctgcagtattgcggaattgctctaagcgtttattcttgaaatgaactctgctcaagatgccaatacctactacgctaattacccataacgccagagtaatcagctcaacgtaatcatgaatatccataattgaatgaatcacctctcttttgatcaaacgatccaagggggctaacgaatgtccattggacttcacctctgtttgataatgttcaacaagacactaatacacttgatttatattagtttttagactaatataaatgtataagaaataaccgaaagctggtaaatgttccgccaagaattttattaacttaggttgttttctttttcatatctcgttgacaatatttactataagttaattaactaattatgtcaataaaaaaagctaaaaaactattattttttcgaacaagtattcttgaaaggcttggtatgattgagttagagcgcacaaaagaattagcaaaaaaatacaaaatgaatctccgtgaagtaaatgacaaggcaggtttaggtagaaattccatctataattggaagaatcaaagaccaggaattgatgcacttaatgcagtcgcagatgtactacatacgtcagccgattatttaagtggtaagacaaacaatcctagcccgtcacctaaaggtgatgaaactggtggtatttctattgatggtgaagtaccatatttctatcatggctacactattccagaagactacctgaacatagttcgtcaacttatggaacgtgatatcaaaaaaggacttattaaacgacatgacaacagcagatcagaataaacaagaactcatagactggttattagcctatgctaaaaaacgtgatattatggttgaattagttgaagtaaatccaacttacccatccatttctttaaagaactatagattcgctgtcattaatactaattggcatcatcaagaagaagtaccattttcaataggtcatgagattggtcacattatgctgactaatggtgaagtagattctcgtcaatatatcacttttacagaacagaattccgaagaaagtccagcagacatcttttcaataaagctaatctataattactcctgcaaaatgggtgattgcttcgaagatacaggtttatttatgcaagcatacgggataccaaatcgagtagctgatgcaactaaagagatatttaagcgagcagcttaaccatcaacttctatattgatttgattactaaaagttttagcattagtttttacactacttaaaatccaattaaaaaaagtgtctgggaaaaaactagcttccagatgaataaaaacgatcaagatttccttttttaagaatcttgatcgtttttttgttctctttaaaatttttaacaataaaaatcggcccttcagccaccttctttgacaatatttgttcaaattcatcatcataaaggcaattccgatatcggtttcgaccttctctttacctcgcaggtgcgttctgcgcatgccaaatacgttcttcaaatgtccgaaaactggctctacatcatattttctcatgccatagatgtgtctgccttcttcgctttggagaacttcttttgctttttcttttaaatattgccagttaggattatagcgaacttggcgctggcggccgctagctgttttagccaattgttccaattctggcgttagctggaactcgtctgcctcataaaccttaaaatcacggacctgaccagtagaacgatccttacgctggctgtaatatttgaaattgaatctgacgccatgatgatcaatgtaataatcatctttttcattgtagtaccagttgattagcttagttggatcattcttatactttctggtctgttctttttcatacatagtgtagggaataaagtacttcttgtctggatatttttcctccagcatcgaataattgtattcactgccatagccagcatcggcgacgattttgtcaaacttgtccaacacggtcatttgatccaaaaccggctccaaagttttgaaatctgtcggattaggaaagatggcataatcaactacatattgatcggtcgtgactgcttgaatattgtagccaggctttaattgaccatttttcatgtggtcttccttcatatgcataaaggtggcgtcatgatctgttttggaataactgttgcgtccggcaaagatctcttcggcttcttcatatttttgcattcttggcacataatcttttcttagccggtgcagaatcttttttagtccacgtcgcttggcttttcgaggtgaaccgccaggaatggctttgttttcctgctcaatctctttagtcagcttgttaatttctgcttcagtttcttgagctaattcctttagcccctgactagtttgaactttttctttttccatttctttgactacttctttagtaatcaattcatcataaagttcaactgcctggcctttcagcttttcatgatacttttcaaccgctttgcgccagacaaatgtatagcggttagcatcagcttcaatcttagtaccatcgataaaagcagcaccttcattgattaagccttcatcttctaacaggttagtgaagtagataaagctctttttaatcagttcattggcatggctgcttgatctaaaattattgatagtatgatatgaaatcttttgctggtcagccaagatcatcattggcagattttcttccagcatcaactcaatctttctgccagaaaaaactcttctggagtaagcaaaaagcagtattttgagcatcatggctggatgataggctgggcggcccgttttagcagtcttgcctactaaaacatcttctggaattgaatctacaaaccagctgatgacattagccaaatgattggccggaatggcaaaatctagattaagtgttaaagcagtttgacctgtgatataattcttgtacatgttagtttccaccttttttattttgtgatgatttaataatatcaaggctggagctaaaagtatacaaaaagagcgttgaaacaaaaattcaacgttcttttttcatgatctgagacttagttttttcccagacacttttctatccatccagttcaacgccttgcaagtccttcatcttgctataaaccgcgccacgttgacttgaatcaaactccagaataagcatatctccgccgcgaattacggtttgaccatttggtatgatctcatctccatcgcggtgaattgttcttaccctagtatcaaccggccattgaacctcagaaatggttttatcaaccagtctactgctctcatagaccggcagagccattgtatcagcctgaccagtatagttagccttatggtcactactcttgtccatagcggctgctagaagcccgtagataggcttaccgccaagaagttcatcaactaataacgcaatgaaggccaccacagctaatggcatcaagtgaagtaaggaccctaccatctcagtaattaagataatcgccgtaaatggtgcacgaatgattgctgcaaaatatcctgccattgaaaaaatcactaggttaactactaaacgctgcggtaacaagcctaactgtaccatcatcagtccataagttgcaccaatcaaagcgcccattgtcaaaattggcaggaagataccactaggaagacctgaatcataagcaacaatggagaaaacaattctcatgacataatagaaggctagcatccctacaatgccccaacctgttttagtgattatattcggcaatgccagaattaaccgattacctggaccggtgattaatggccaaaagtaagcaatcgggattaatattgccaaaggaataagtccatgcagccaacgaggtaaaatggtgattttagcatagaccttctttaaactaaataaaccaactttatataaatgacccaataagcctaataaaatccctaagataagcaagtgccagtacaacgaaatcggaaatgaatagttatattgaattgctagggcgtgacgaatgccaaacaagtttgaaacgacaaagtttgaagcaattgcgccagctaaagcattcatccaaactaatggtgaaaagttatggaatacttcttctaagacaaacaaggcaccactcaaaggagcgccaaaagcggcagacaaaccacttgaagcccctgttgcaagcagaattctagtttttaatttgttctgcttgcatccctgagcaacaccttgaccaattgtcgagcccagctgcaatgatggtccttctggtcctaggaatagccctgtgccgataaccaagataccaccgattaatttccgccataaaattggaaaccattgtagtgatagcttcccttgcagttgcaattttacttctggaataccagaaccaccaacatggggatattgtttaacaaaataaccagcaattaccgctaccgcaataaagccaatgataatcgcaataaaccacaacggattctggtgcgctaattgaaacaagtataaccaaaaaccagatgtcttttcgattccaaatctaaataaaccaactactacgccggtacatattccgacaagtagtgcttggagcaacagtttaatattagttctgtttgcctcgtctttcattactttctccctcacaataaaaaaaacgtgtcacaaactattgtacaacaaaaagccagctagaaatgttccaatgtcattaagttaagacattgacaattaagggtgcttttttagagatcgaatcatttggattcgatctctttttttgtataaaataaaggcgaaaagaccagccttttcgcctatcttatatattatatattttaaaccttcaaaattattgccagaaagatggtgttaattatgaaagcccttcataagaatattctagaacgtcttgatcaaattatcaataatactggggatcatattcacgattttattaataatcctcatgcttttaccaggaaacgcactttagatgcagcgacagtccttaaaactacaattaacatgcaaggtcagaatttaaacagtgaactctttagagcttttggcgaagatgcaactaaaaagaacgataaagtagttagtacttctgcctatgttcaacgcaaaagccagctttctcctgcttgttttaaacatattctgactgtttttaatcaaaatctatttaatattcaactttttgatcatcactaccgtttgtttgccattgatggctctgactttaatcaaatctggaatccgaaatcgaataacattgtacaagcttcttctcataaaaagaaaccctattgtcaaattcacgttaatgccttatatgatctattgaataatacctaccaggattgtatttttcagcctaaatcagaaatggatgaacgcaaagcggctgttcaaatgcttaaagctttgaattgtggtccatatattgtaacaatggatcgtggctacactagtttcaatatgattgaaaactgcaatcgcctgcctaactgtcattacataatacgaactaaggctggacaaggcggagttaaagaaataacgacattgcctgatcaagaatgtgatcgtgagatttcctgcctggtaactacttctaactattactacatcacgcataaagccagtgagaatattcaccatgtccagcatcattatcgccaatatattaagtatcgctctaaaaatacccaggatctaagctgggattttggcgagttatgcacaataaaatttcgagcctgcaaatttagaattaatgatgccaaatcaggcaaagaagaatgggaagttgtgctaaccaatcttgatcgaaaaaattatccgctaaaaagaattaaagagctttatcatctgcgttggggtattgagacctccttcaagaaattgaagtattctttaggcagtgtacagttccattccaaacaagataaatttattgaaatggaaatttatgcccatatgattatgtttaatgcaatcagtcaaattgatgcacaggcctatattccgcaaaagcattgcaagtatcaatatgccatcaatttcaagcaatcatgcttgattattcagagcatgtatttggcttcttctttaacgcaagattttgaacggatccttattcagatcagctattataccattccaattagaccaggccgcaaggacaagagaaatattaagcccaaatcagctgtatattatttatatcgcgtagcttaaaaaagcagaatctgtgctatgccttatttgttgtacgaaaaaagcaccaatttaaccaattaaatgttaaatcagtgctttaaaagtctaatattaattgtcaatgtcttaacttaatgacattggaaatgttctaactgacttttttgtttcatgtgaaactaattatttttcttcataccattcggtgtggaagacgccttcacgatcatttctaaggtaagtgtgcgcaccgaagtagtcacgttggccttggatcatattagctggcaagtttggattaaagattgattccaaccagttaagagctgcgctcaaagttggagttggcacaccacacttagtagcaaattcaactgacttacgcaaagctggcaagttttccttcatcaaaccgcggaaataatcgtcttggaataggttcattagcttgccgttcttgtcataggctttttcaatatccttaagcattgcggaacgaatgatacaacctgcttcccaatcttgagcaattgacttgtatcttaagtcccaatcataagcttcagcagccattgtcaattgttggaaaccttgagcataggcaacagcttgggctaattgcaatgatttttcgaatacgtcaaccatatcatcaggaatttcaccattgtattcaaacttagttggtttaacgcccttttcaattgtcaagtgtgcttgcttactcatgaaacgtgccattacagcctcggctaccaccgttacaggagcgccaagtgcaacaccatcttcgagcatccagttaccagtacctttgtatgaagcaacgttcaaaatgtgatcgattacgtgatctggcgttaaatcatctttttgtgccaaaacctttgaagtgatttcgctaagatatgcttctaccttaccatgattccatttatcaaaaatttctgacatttcatcatcgctcttgtgagcaacgtcacggagtaagttgtaaacttctgaaaattcctgcataataccgtattcgataccattgtgcaccattttgacatagtgaccagcaccttcaggtcccatgtagtagacacatggcttgccttcagtattcttagcggcaatagcttcaagaattggagcaacttccttataggctggttcatcaccacctggcatcaaagctggaccattcaaggcaccctcttcaccaccggaaacacccataccaataaaatgaatgccgtgcttttccatttcgtggaaacgacggttagtatcgtgataatttgagttaccaccatcgattaaaatatcgcctttatccaaaagcggcagcaatttttgcaaagtttggtccactggatcgcctgccataatttgaatcaaaatcttgcgtggcttttcaagtgagtttacgaactcttcccaggtgtagcaaggctttaatttatcatcttcatattttgcgaaagcatcaacttctggtttgtcgattgagaaaccggaaacggagaagccgtggtttctaacattcaaagcaaggttcttgcccataacagacaaaccgataacgccgaattgttgcatgtttattaattcctccattaatcaaagttcatcaagtattattatacgttctagcacgcaaaaaagcgaaaccaaaaggttccgctttttaaaatctagttaataatttttttgttattgggtaaaggtgtttcacacactgctcggtaatatttcctaggaaatattacttttattgatcaataccccaaagtaaaatgttaaatgctaatggtaatgttagcttggtaatgtatccatcctttttagcctgttttaaagatgctagaacaaatttacgttgttgacccgttagctttttggctactttaacagctaaattaaagtcatactcgttttttctaatagcatttttgataactatctttgcccacagaaataggttgagaatcggagtttacagttacaatgtagctccacttgctaagtcgaggaatatttttaattgttatagctttatcaaacttagctactgcagttgaattgctgttgtctgcagcgttggcagtgacagacgatgctgaaaataatgctgcaagtaaagcagtagcaagtaaactaattagagcttttttagatttcataatttagcatctttttacacatagtgcttattggctaataagcattaattcatatccaacactgtctattataagcatctgtattctatttactagccaacaaactattttatatttaaaatcgtatataaaatgaggctatttcccaggaaatattttcccatacaaaaaaagcgggacaaacgtctcgcttctttataattactcaaccaaattagtgttgtgaagcacctgaaaccgtatcaggagcaggatcctcttctggttctgattcttcatgttgagatgcacctgttgcagcgtcagcttctaagccgtacttttctgcaaagtaactgaatggcttcaagtcttcagcttgatacttcttgacaaaggctgggtcgtcaagtgagttcaactcagttgagtaaggcatttcgtgagtgtacttgacgtcgatcaacattggaccgtccatcttcttgaattcgtcgacagcatcttcgaattccttcttggtgcgaaccgttacacccttaacattcataccttcagcaacctttgcccagtcgttatcagggataataacaccagataatggttggtgagattcatcttcttgttctgcttgaatgtaacctagtgtttcgttagtaaatacaatattcaaaacatgcatgttgtaacgagccatagtaagaagttcttggttcatcatagcaaaaccaccgtcaccagctaattgccatacttcacggtctgggtaaacagttgctgcagtaagagcagctggagcaccataacccatagttgcgtgcaagcctgaagtagtccacttttgatcatcatgcaagttcaaaagacggcatgagtcaacgttaacgttaccaacatcaatagcaaagatggcgttgtcatcagccttcttgttgataacatcccagattggttcaggacgtacaggcatttcatctgagttcttaaagcttgcttgccatgcatcccagttctcacggtctgcaatagcagccttgtaaagtggtgattcgctacgttcttcaccagcgtcaataattgctctcaaagccttcttagcatctgcaagcattgaaacatcagttgagtgacgcttaccaaacttagctgaatcaacatcaatttggataaccttagcgttcttagggaaccataaaactgagaatggtgagttgttacctacccaaacaactaagtcagttgcgctttggacttcttgagcagccttaggtccgatacggccgatagtacccatgtatgctgggaatttgtcttctactacacccttgcctaagtatgatgacataataggggtcttgaacttttcagcaaattccttaacttcttcaccagcatcctttgcacctaaaccaatgtacatggttgggttcttagcttctttcaaaagcttaacagcttcttcaactgaagccttagttggtgctggataattgtctgctggatgagcatccttgtttacacggaaggtgtcatcaatcttttgccaaccgtagtccttaggaataatgataactgcaggaccctttcttgcgtaggcttgacggatagcttcatcagttaaaattggaatttgttcagcggtcttagcttggcggcaccaaacactagcgttcaagaaccacttgtcttcatcaaaagcttggaagaagtcaatatcttgacggctagttggaacgttagcaacaattgctaccattggagtcttgtcaaacttagcatcatacaaaccattgaataagtgggcagcaccaggaccagctgaaccgaaacatacacccaacttaccagttaacttatattctgcagaagcagctaaagcaccagcttcttcgtgacgtacttcaataaatttcatcttatctctaaagtcatagatagcgttcatacttgagtcgaatgaaccacctgggaaaccgtagatatgatcaattccccaatcgtaaataactttaagcattgcatcagaaccattaatttttgtcatataagtgcatctccttaacttttgttctttcataatgtattaaaacactttttttcacatttgcaaaccgataaaatcaccgttattacgcaaatgaaaacgcttttgtaataataatcacttcacaagctttaccaaattcaatatctcaaaaagctgaatggtagcgttttatattgtgatttgatgaacattattatactaaatttcacttattttatgtatattcattgttacttatagtaaaaatttaagaaaaaattttttacaatttatttcatagctatccaatttagaaaaacgttattttataattttgcgcataaaaataacgtagaatactattcctacgctatttttgtgctattctactttttcactctagagtaacgcccattttgaatgtaaacactcaagattgccaagtcagctgggttaactcctgaaattcgttctgcttgagctaaagtttcaggacgaattttttcaaatttttgccgtgcctcagtagctaaaccttcgatttggtcataatcaatatctgctgggatttttttggcttcttgtctctttaagcgagcaattctggtttcttctttcttgatatagccagcatacttgataccaatctcaacttgttctttaacgtaacgatcgcctggaactttttcaccagttaaccgttcaatatcagcaatagtaacattagggcgacgcaagaaaacatcggccttaacaccggccttcattggttcctgaccaatactttgcaaaaattcctgcacctcatcagttaaatgaaccgtaatttcatgcagtctcgtctttgcatcttcaatcgcatgcttcttttcttcaaatcgtgcgaagcgttcgtcagaaattaagcccagatcatgaccatattcagtcaaacgcaagtctgcgttatcattgcgtaaaatcaaacgatattctgctctactagtaagtagacgatatggttcattcgtccctttggttaccaagtcatcgattaacacgccaatgtaagcatcgttacggcctaaggtaaatcctggcttatcttgagcagataatgccgcattaattcctgcaattaaaccttgaccagctgcttcttcataacctgatgttccattcatctggcctgcagtaaataaatgctttacgtttttggtttccaaagtatgcttcaattgccatggttcaaccacatcgtattcaattgcatatcctggtcgcatcatttccgcatgttctaatcccgcaacagaatgaatcatctttaattgaatttcttctggcattgaagttgaaaagtcgcctacataaacttccttggtagtctttccttctggttcaaggaaaatttggtggcgatccttatctgcaaagcggacaactttgtcttcaattgaaggacaataacgtgggcctacacccttgataattccagagaacatcggtgcacggtcaagattgtttctaataatcgtgtgtgtggttggattagtataagtcatccaacaagaaatttgtttttgtaaataatcttcatcacgactttcatatgaaaagtgccgtgggattttatcaccaggttcttcctcagttttagaatagtcaattgtattgccgttaacacgtggaggagtaccggttttaaaacgacgcagcttaaaacctaacttttctagattttccgacagcttaattgaaggagtagtgttatttggacctgaagaataagtcaattccccaataataattttaccgcgagccgctgtacctgtagtcaaaacaacgcttttagcatgatacttcgcaccagtattggtaatcacacctttgcagacgccatcttcaactaccaattcatccacgatagcctgacgcaaggtcaagttgggcgtattttcgatcgtatccttcatgtgttcatgatattgccacttatcagcttgagcacgtagcgcacgcacagctggccccttacccgtatttaacatccgcatttggatataggtagcatcaatgttctttcccatttgaccacctaaagcatcaatctcacggacaactgtccctttagctggtccaccaacagatggattacatggcataaaggccaccatatccaaaccaatcgtaaccagcaaagttttttgtcccatgtgggcacttgccaacgcagcttcacatccagcatgcccagcaccgacaacgattacatcatattcatttgaatcatatgttttaaccattttcatcctactttcctaaacagaattgactaaataattgcgtgattaattcatctggggcactttcaccagtgatttcacctaaagtatcccaagcaccagtaaaatcaatttgtgcaatatcaacagggacgccatcttcaactgcttgaattacatcttccaattctttcttagccttatgcaataaggaagcttggcgttgattggttaccataatttgatcattagaattttcaatcccagcaaaaaatagcttattaatcaattcttcaagcgcatctaagttttgttctttcaaaatcgaagttgaaataacatcactacccgttagtttctccatctcagtagttgttattttttgacctaaatccgacttatttaagatcacgattcgcttcttgtcctttgttgcttcaattaaggcttgatcttcagctgttaatgcttgactagcatcgattaacaacaagaccagatctgctcgctccaaggccttttttgatctttctacaccaattttttccaccttatcttcagtgtggtggattccagcagtatcaattagctctagcggtactccttttacagacacatattcttctaacgtatcacgcgttgttccagccacatcggtcacaatcgctttgtcgctttgagtcagataattcaataaagaagactttcccacattaggacgaccaacaattgcagtagccaaaccattgcgcaagatttttccttcttgtgctgtcttcaataagcgattaattttatcaattactgatctagatgtgtctgccatctgttttgcggtaacagtatctgcatcatactctggataatcgatattaacctcaacgttagccaaagtattcagaatttcctgccgcattgcctgaatcttgtgtaacaatccaccagctaattgaccaacagccacttgtcgtgccttatccgtcttggcccgaacgatatccatcacactctcagcttgagttaagtcaattcgtccgttcacaaaagcacgtttagtaaattcaccaggatcagccattcgcgcaccgtgactcagcaacaattgtaaaatatgattagttaccacgattccgccatggcaattgatttctacaatatcttcacgtgtaaaggtcttgggcgcacgcagcactgtcaccattgcttcatcaatcgttttcccagtatccggatcgataatatgaccatagtgaatagtatgtgtcggcaccttgcttagatcttcgcctttaaaaacctcatcagcaatcttaattgcatcctcaccagacattcttacgattgaaattccgccttcaccgatgggggttgaaattgctgcaatagtatcgaactctgtcaaagtttgagccataattcttcccttttctcaataaaaaaagcgcattataccaccacgaataaccatgatggataaagcactttgactactttatctaaaaatcattttagactaatattcttttatttctttttgcgtcctaaacgcttgtaagcccttcttagtttacgtttgcgttcacgctcagcctcagcctttgcttcttgctctcttctatatttaatagggttttgcaagataaaggtttgaagcgcctggaacaagttggaaattacccagtaaagtgtaatagctgactggaagtttaaggccatcacaccaaccatgatagacattccgtacatcattactttggtcattccattttgcgatgattttggcgtcgataattgactaatatacgtcgataagaacgtaaagatcattgctaaaataggcatgatgtaatatggatcgggcttgcttaaatccatccataagaagcgcccagtttgtaactgcggtgtacgtaaaatcgcaccatacagtgcatacataactggcaactggatcaggacaggcaaacatccagtataaggatttacgcctgcttctttataaagcttgttagtttcttgttgtaataatgttcttgattcagtgtcacgtcctggatatttcttacgcaactcattaatttgtggttgaatgctttgcatcttagtagtacttcgaattgaaatagcattcaaaggtactaagatgacacgaacaatgacggtgaagacaataattgcccagccataactgttccccattaacttagctagccccaaaataaaagctgacatgtaataaacgatccaacggtcccaccaattaccacttgtatgtgagattggcgttgcttgaccatttgctcccgtagtagcacatcctgtcaatacaacagcaagtattgctactgctaagactgcaagaagacgtttgacatttctcttggtcagaatgtccttcaatctatttttcctcaactttatctggcatttcttcaataatatgagctaacgataatgcgtgaagcaagtttttacgcacctgagccatattaaaatcgcgagcataaggtcgcgtaatgattaaaaaatcaacatgcggattaatctgcaatttttcttcatcaatcacggcccgaatataacgcttgagtcgattacgtgcgactgcggtatgaccaacctttttgcccacagaaattcctactcgaaagtgtttattttctgttttttctaccttataaatgacaaaagctcggttagcgactgagtcgccagattcgaaaacttgctggaaatctttttcagattttactcgataagactttctcaaaacgtttcattccactctagtagactaaaaaaaccactgggattcagtggtttaagcagataagacttttctaccttttgcacggcgtcttgctaaaaccttacggccatttgatgtgctcatacgcttcataaaaccgtgaacacgtgaacggtgacgcttcttaggttggtaagttctcttagttgtcatattaaactgcacctccataaatttttgtgccaattgcacaatgtcttattaaggatagcacgaaaagccataaaaaccaagtattttaagaaaaaaagacttttaaatcccgtgaatattttctaaaaattcattgtttttcatgtggataaaaaataaaatatttttcttacgtataatttccacaagataattcccaacgttttccacaactcacatggtgttaaaaacttaattcacaccatgtggataacgcatatagtattttacctcaagtattgatagaatagtatccataattcacagctgtactgtgcataaattaacggttttgctcttatcatgtcaaaatgtgcatatcgctttaatagttgtcaacaggctgtgtgttttgttgatttctttttcacctgtggaaaaccagttaagtaaatggtaaaataaatttgctttttactaactgggggaatgtaca

SEQ ID NO: 15 - DNA, 37513 bp, Lactobacillus crispatus
  source 1..37513: mol_type = other DNA
atgacaaaatcaacaaatttcaattactatgaagccgataacgtatatggagccttatttttccagtttcctaaggtattaatgtatggcgagcaatataaacatttaagcagtgatgctaaattggcttatatggtactgaaagaccggctcgagtattctttacgcaacaactgggttgatgagcaagggcacgtctactttatttttaccgttaaagaattacaagatttatttaactgcgctactgaaaaagccgttaaaatcaaaaaagaattgcaaacagccaatctattaaaacaaattcaaatgggatttaatcctaaaactaaaaagaatgaaccaaatcgtctatacctttctaaactcgatgtgaaagctactgatgtctatttaaggggcgaatatgggcaaaaaaagccggaatcccttactacgagcggaatttcgaaaatcgaaagtccgcatgacttcgttgaatcccttgctacgagcggaatttcgaaaatcgaaagtccgcatgacttcgttgacgacaaccctcaaacccttgctacgagcggaatttcgaaaatcgaaagcaatctatataaagactataaaaataatatagatactaatagatacgatatagatactcaaaagttggacttttccacaactaatttttcaccagctgaaattgaagcccaaaatcgagatctagtaaaacatgctgatgagttcttaactgacgaagataatgggttgccggtcttcttagaaccagaagcagttcaactacttagcttttggtgccgtaccccacaacaaatgcggcgctttattggcattatcttaaacgccaaatatgctgttgaaaaagagcataaggatttaggcgtatggattctattagacgatcctgatttaaaaaaaatgatgaccaaaacattaagacgctattttaatgctctaagaagcgacgagaagcatatcaagaatgttgagaactacctgtacggcaccatgcaaaacctatttggtgtttggtggaaccgacaagcagctagagaatatgcggccaaacaccccgaagaacagaatcttgatggcgagcgcgcttgggactaaaacgccatataagcccatttaagccacttcaagtgttacgcatatattttactaaagccactttaaaatcgcttagaagtaaaaacagataccttgagtgggcgaattggcgatagctaaactagaaaaatgggataggcgctttttaaatgaccaaaccaagcaaagaagttgaaaaaaattgagcaattgttggctgacccatgggcagtcgatattcaagacatttgggagcaagcagcccaaaatcgagatcctgataaatgcaagctgtttgacgcgttatacacttacctcttagataaacgccaagaacaaatcatcaatgaaaagcactttttgatttaacatagacagttcaaataatcaatgattgaaataaaaaggaggcacaaaatatggctaagacacgaacatatatggacaagtatagattcacaactgcggaaaaccaacggtttgcccgagcaaattttaccaagttagtgcatactaatgctcgctttgaaggcgttaataccacattgccacaaacacaaactattatggacggtatgagcgtagcaggagtacctgttgaagatgttttgacgattgttaatttaaagcgtgggtggcaatatatcactactcaaaattcccctttaacgttaaccatggaaaaacaaatcaacaaaattgtggcagcagaagacgccttagtaccaggagaattacggcaagggaaagggggagttaatttaggtagtgaagacttttttgagccgcctttaattaacgaaaaacaggaacaatcctttttacaaaaaatcttgactgatccacgaacgacgattactgataaagcattgactgtcatgtatcataatatgcgtcaacaaatcttttgggacggaaacaaaaggacggcaactttaagtgccaataaaattatgattgacggtggcgctggtttaattaatatcccattagataagtgggatcaatggaacgaactaattgccaattattatcggactaatgacatgactgaagttaaaaagtggacatatgataatggtatccaaggattacaaattcgagcaaacaaaaaattaagtgttaatcacaagtagtaaattatgtatttaatatatctaaatatgcctattaatgatataattgaccgcaaagaaagcaggtctatttttatgtcaagaatttataaagttggcgaagctgctaagcttctcggtgtatctcgctctaccatgcaaagatgggatcgagaaaaaagactagttgctcagcgcaatgttgccaatcgcagatactatacgcaagagcggctggatgcttttaggggcattaagcctcaccgcaagacagttgcttatgcccgtgtttcttctgtaggtcagaaagaaaatcttaggcatcagatggctttcatcattgaatatgccaatgctagaggcatcattattgatgaacatgtagaagatattggatcagggcttaattataaccgcaaaaaatggaataaattattggatgaagtagaagcaggaaaaatagaacgaatctttgttacctataaagatcgttttgcccgctttggctttgattggtttgaacatttttgtgctaagcacgatactaaaattattgttttaaacaaccctgaaacctctccagatgaggaaatggttgaagacttaatttcagtaattcatgtgttttcatgtcggctttatgggttgagacggtacggcaggaagattaggcgggatttaaagaaggaaggtgaaaagagtgatcatcaaaaccagaacatatcgattaaaacccaatcaaaggatgaagaaggttcttgattcgctttgtgattacagacgcttcagctggaatctcggtttagaaacctggcaaaatatgcatgaagccagacaattggctttaacccagcatcttaaagcagaacttaaaaagcctagaaaaaaacaaaagcttacaaacgctgaaagagaaattctcgcaaacaatcctgtcccttcctggcgcagaattcgtgatgagctgactgaaaacaagcaatactggcagacaaagcttccagctcatgtctttaatttggcgatccaagacttaggcaatgcttggcagaatttttttgataaagcgcagccaggctggggaaagccaaaattcaagtctaaaaaagcacctaggcagggatttaaaatggatcaggccaaaattaaggatggctgcttatttttagaaaagcctagggctgtcaaagaaacatggaacggctttaaattaagctctgctccattgtcggatgatttcggaacaatcagcttttacaaagaaaaaaacagatactatgcatccattccttttaaaatatctgatccagaagacaagcctaagacaggcagatatacaggcgtggatatcaatgttggacatttcaattacagagacggtcaatgcatagtaatgcccaaatcgttagcagcagtctattgcaaaatcaagcattatcaaagacagctgtctaaaaagcgtgtcgtcaatggtaaaatcaaaggaatgcaaagcaagcgctacatgaaagcgagaaacaagcttcaagcagcttacgctcgtgctaaaaatattcaaaatgatttgatgcagaaatttaccacaaagctggttagcgaatatgattctattgtgattgaagacctaagcgttaaaggaatgcttatgagtcatgttgcctccaaaggaatgcacaggtcaatgtttggcagatttagacagatattgacttataaatgcgaatggtatggcaagaaattgatcgtagccaataaactgtacccttcaactcaaaggtgcgcagcctgcggattagtgaaaaaaggcgatgaaaaaatcactttaagaggcaataagaagcatggcaccaagcataatgaatttgtttgttataatccgaactgccgtaactataataaaaaagttgaccgtgacgaaaacgccatgctcaacttaataattctggtaaaacatccagaattaaataaagccttataaaaagaatgcgggcgaagctacgtccgaaaaagaagtcaaaagagtcggtcaatgcgattactcccaagttggaatatcggaaaactgatgaagacgttgataagaaaagcataggcatgttaagccataatgactacaaataaatacaatgtagttgtttgcatatgtttttcatagctgtacaacgaggacaaatacaagctctgcttgatttaggcataacctcctgttccgctattgctcgagaagttggctgtcacaaatcgacaattagccgtgaaatcagacgtggcagcgtcctgcaaagagatcataactatctgctctatgagcattactatgccgatactgcgcagatctatcatgataagcgacgcaagaactgctataagcgtgatcagttaaagcattatgctgtttttctgaaaatgctgtctaagcggtttaaaactaaatttgatgctaccagcattgatgagtttgtgggtgagttcaagcagacgatgccaggctatccttgccccagcacgcctaccgtttatcgctatattgatcgcggtttgctagatataagcaatattgatctgccaatgaagcttaaaagacgcagaaacaaacggcatcatagtcatggtgggcatgctttgcataaaaagaatcttggcaattcaattgagcagcgtcctaaagaagttgaagacagagcaactcctcttcactgggaaggagattgggttaaaggcgttagacgtaaaaatcagcctgctttgatgactctgacagaaagaactactcgttttgaaattgtcatcaaaataccagattatcgagcaagtacttgtcaaagactgcttcaaaaagaaatagaccagcatccagattggttcaagactattacttttgataatggttctgagtttgcagatatgactaaaattaaaaactgtcagatctacttcgctcatccatattcaccttgggaaagaggcacaaatgaaaactgcaacggtcttctgcgtcaattcttccctaaaggcaaaagcatgaacgataagacagctgcatatgttcaacaggcaactaatgccattaaccacaaacatcgccgaatcctccaatatcacacagcagaagaactcttcaagcaatatatctcttcataacctaactgttgcacttaaattgacaattcaggaactaatttaagttctaatttatccgtttttttagttgcttgtacatctggttcaattcattagcagctatgaaaaacatatgcaaacaactacattgtatttatttgtagtcattatggcttaacatgcctatgcttttcttatcaacgtcttcatcagttttccgatattccaacttgggagtaatcgcattgaccgactcttttgacttctttttcggacgtagcttcgcccgcattctttttataaggctttatttaattctggatgttttaccagaattattaagttgagcatggcgttttcgtcacggtcaacttttttattatagttacggcagttcggattataacaaacaaattcattatgcttggtgccatgcttcttattgcctcttaaagtgattttttcatcgccttttttcactaatccgcaggctgcgcacctttgagttgaagggtacagtttattggctacgatcaatttcttgccataccattcgcatttataagtcaatatctgtctaaatctgccaaacattgacctgtgcattcctttggaggcaacatgactcataagcattcctttaacgcttaggtcttcaatcacaatagaatcatattcgctaaccagctttgtggtaaatttctgcatcaaatcattttgaatatttttagcacgagcgtaagctgcttgaagcttgtttctcgctttcatgtagcgcttgctttgcattcctttgattttaccattgacgacacgctttttagacagctgtctttgataatgcttgattttgcaatagactgctgctaacgatttgggcattactatgcattgaccgtctctgtaattgaaatgtccaacattgatatccacgcctgtatatctgcctgtcttaggcttgtcttctggatcagatattttaaaaggaatggatgcatagtatctgtttttttctttgtaaaagctgattgttccgaaatcatccgacaatggagcagagcttaatttaaagccgttccatgtttctttgacagccctaggcttttctaaaaataagcagccatccttaattttggcctgatccattttaaatccctgcctaggtgcttttttagacttgaattttggctttccccagcctggctgcgctttatcaaaaaaattctgccaagcattgcctaagtcttggatcgccaaattaaagacatgagctggaagctttgtctgccagtattgcttgttttcagtcagctcatcacgaattctgcgccaggaagggacaggattgtttgcgagaatttctctttcagcgtttgtaagcttttgtttttttctaggctttttaagttctgctttaagatgctgggttaaagccaattgtctggcttcatgcatattttgccaggtttctaaaccgagattccagctgaagcgtctgtaatcacaaagcgaatcaagaaccttcttcatcctttgattgggttttaatcgatatgttctggttttgatgatcactcttttcaccttccttctttaaatcccgcctaatcttcctgccgtaccgtctcaacccataaagccgacatgaaaacacatgaattactgaaattaagtcttcaaccatttcctcatctggagaggtttcagggttgtttaaaacaataattttagtatcgtgcttagcacaaaaatgttcaaaccaatcaaagccaaagcgggcaaaacgatctttataggtaacaaagattcgttctatttttcctgcttctacttcatccaataatttattccattttttgcggttataattaagccctgatccaatatcttctacatgttcatcaataatgatgcctctagcattggcatattcaatgatgaaagccatctgatgcctaagattttctttctgacctacagaagaaacacgggcataagcaactgtcttgcggtgaggcttaatgcccctaaaagcatccagccgctcttgcgtatagtatctgcgattggcaactacacagctatgaaaaacatatgcaaacaactacattgtatttatttgtagtcattatggcttaacatgcctatgcttttcttatcaacgtcttcatcagttttccgatattccaacttgggagtaatcgcattgaccgactcttttgacttctttttcggacgtagcttcgcccgcattctttttataaggctttatttaattctggatgttttaccagaattattaagttgagcatggcgttttcgtcacggtcaacttttttattatagttacggcagttcggattataacaaacaaattcattatgcttggtgccatgcttcttattgcctcttaaagtgattttttcatcgccttttttcactaatccgcaggctgcgcacctttgagttgaagggtacagtttattggctacgatcaatttcttgccataccattcgcatttataagtcaatatctgtctaaatctgccaaacattgacctgtgcattcctttggaggcaacatgactcataagcattcctttaacgcttaggtcttcaatcacaatagaatcatattcgctaaccagctttgtggtaaatttctgcatcaaatcattttgaatatttttagcacgagcgtaagctgcttgaagcttgtttctcgctttcatgtagcgcttgctttgcattcctttgattttaccattgacgacacgctttttagacagctgtctttgataatgcttgattttgcaatagactgctgctaacgatttgggcattactatgcattgaccgtctctgtaattgaaatgtccaacattgatatccacgcctgtatatctgcctgtcttaggcttgtcttctggatcagatattttaaaaggaatggatgcatagtatctgtttttttctttgtaaaagctgattgttccgaaatcatccgacaatggagcagagcttaatttaaagccgttccatgtttctttgacagccctaggcttttctaaaaataagcagccatccttaattttggcctgatccattttaaatccctgcctaggtgcttttttagacttgaattttggctttccccagcctggctgcgctttatcaaaaaaattctgccaagcattgcctaagtcttggatcgccaaattaaagacatgagctggaagctttgtctgccagtattgcttgttttcagtcagctcatcacgaattctgcgccaggaagggacaggattgtttgcgagaatttctctttcagcgtttgtaagcttttgtttttttctaggctttttaagttctgctttaagatgctgggttaaagccaattgtctggcttcatgcatattttgccaggtttctaaaccgagattccagctgaagcgtctgtaatcacaaagcgaatcaagaaccttcttcatcctttgattgggttttaatcgatatgttctggttttgatgatcactcttttcaccttccttctttaaatcccgcctaatcttcctgccgtaccgtctcaacccataaagccgacatgaaaacacatgaattactgaaattaagtcttcaaccatttcctcatctggagaggtttcagggttgtttaaaacaataattttagtatcgtgcttagcacaaaaatgttcaaaccaatcaaagccaaagcgggcaaaacgatctttataggtaacaaagattcgttctatttttcctgcttctacttcatccaataatttattccattttttgcggttataattaagccctgatccaatatcttctacatgttcatcaataatgatgcctctagcattggcatattcaatgatgaaagccatctgatgcctaagattttctttctgacctacagaagaaacacgggcataagcaactgtcttgcggtgaggcttaatgcccctaaaagcatccagccgctcttgcgtatagtatctgcgattggcaacattgcgctgagcaactagtcttttttctcgatcccatctttgcatggtagagcgagatacaccgagaagcttagcagcttcgccaactttataaattcttgacataaaaatagacctgctttctttgcggtcaattatatcattaataggcatatttagatatattaaatacataatttactacttgtgattaacactcaggcgctgtcccagctgtggatacaatatgttgcaccctaacggacacaagctcactcatgtccacattgcaggatccatggaccggcccgtaattctagagctaaacaagcaacgctggcgttgtagtaactgccatagcacttgtacggccaccactccagtggtatcaaccaaccacgccatcggtcacggactagcgactcatgtgctgaagctagccagtaaatcactcccggctaagactatcgccagtctcaccggtatttcgacaaactcagttcagcgtattttgacgttattagctaatgcgttattttccaaagccaaccatgcctttcattatttgtttctttagttaatagagttactgcgaaacatctgctataatcttaaattatgaaatacgaaacagctaaaaatttaaacaataccagattcaagcgtctgatcggcgttgccaagcctgtctttgacgaaatggtcaaagtattaaaagccgaatatcaagtcaagcatgcccgaggcggcagaaagctcaagctggcaattgaagacctgcttctggctactttgcagtacctcaaggaataccgtacttatgaacaaatagctgccgattacggtgtgcatgacagcaacctgatcagaagaagccactgggccgaagagactttggctaagcatggctttaacattggcaagcaagaaatcaagccagacgatgttgtcttaatcgatgccactgaagtaaagattcaacgcccaaaaaaagacaagcagcttattattccggcaagaaaaaacagcacgttttaaaagcccaggcggaatttcctcatgtggattaccgaaatcatcaaacctgcaatttgaataatctaatacctcaaaaccagctcccgaagatctaataaaagaaaaagtcagccatttacgaactaattttttaaaaagctctgtcgaaaaatctccaacaattgttaatcgatctatgctaatttttacattttgtctcagatttgagtactctgactggctgttagaaagagccagcccttttttctcatttttattctctactcctacttttacattttcattctctacttttgatcttctatttctaacattaaatggtaattattgaaaataataatacttaagcagtttctttttagaaactgctttttgttttgtaatcaaaagttgaaagtcttgaatacaaaagtagaatcttctaagatagggcataagccatattcataacttgtattcataattgaaaggaaatatatgacaaataccatttatggctatgctcgtgtttcaactactcagcaggactatgcaactcaagttgaagacctaaaacaggcaggagcgaccaaaatctttaaggataaatacacaggcaccacagcaaatcgaccagaattcgataaattgatggctcaaattggtagtggtgataccctaattgtcaccaaattagatcgactagcacgtaatactcaggacgcattgaacattgttaaacaattaaatgctgagggaatcattctacgcgtcttaaatattggtacgattgataattcaccaagtggccgtctaatcttcactgtattcagtgcatttgcagaatttgaacgtgatcttatcgtgaaccgaacccaggaaggcaaggcatgggcaaaagccaataatcctaacttccatgatggtatgcctcgaaagtacacctcagaacaaattgattttgcgtggaagctccatactcaagaccacatgagctattctgaaatcagtcggaaattaggtatgtcaaaagcaactatctaccggcgttttagagagttaagagacaaaaaagccgccccgaaggacgactttttgcactagtgctttaatagctggtttagttcgtgaaggactaaatgtaattcattcaaaagtgcgattgttaggattagtgttacaacatctgacatgatacagctcctttctagccttttacagcagtgtaggggcacaaaagcatgccataactattttatcatgttataatgattaaaggattagtgttatgctgtcgacatgaacgaggcatgcaaaacgtgggcggtcgtttgaccgctttttttatttagcatatttctaaaatttgaccaaaaaaataaaaaagcgttgatctgtcgcactttttcatcttgggaaaacaaggcatgagcgaaagctaataataccaacctccatgatggtatgcttcgaaagtacactccagaacaaattgattttgcctggaggttgcatacaggagctattctgaaatcagcaagaaattagggatctccaaaacaccaatttatcgacgctttagagaattaaagaatgcaaaataaaaaagtcaccgactatacaactgccgatgactctggtcgcgtctactaatgatgactacttatcaagtagattatttagttcccgaagaactaaatggagctcatgtagcagaacgcaaattaggaaaattgtcatgtcgtccaacgtctctcacctcctatagggtggttgattgagccaaccctagaatgtgcatgaatgacatgcatttttattttagcatgttataatacatgtaggaaaattgtcgcgtccaatgatcatggatgcatgcgcagcaagacgataacttgcgaacgcgcggtggctctgcataatagcagggcttttttgttttgaaaatcattattcaaagctaatttctgacttaatgctattttgtctactcctttttttaattatttattggtcatctccatcacgatcatcggaatattcaaaatttgtttccgcattatcaccttgctgatcctgatcctgatcgttatcggtattaattctatttgaaatttcagcgctatcagcagaagaactcttcaagcagtatatctcttcatagcctaactgttgcacttaatttgacaattcagggagatttttttgtcaaaaaagcaaaaaacaacacctacattatttttggaagataaaataaatttgaaaataattttgtattatcaaaacggcttagccacaatatattgattataaatagccaaaaatccacatgttgtattattgagcagaagatgctatattatgttcacacaaatattagataaaacaataaataatgataggagcaaatacaaatatgagttattatgatcattcacagtcaccagttgaatttgcttacaataacaacggcaaaaatatgcgagctattaactggaatgacattaaagatgataaggatcttgaggtttggaacagagttactcaaaacttttggttacctgaaaaaatcccagtttcgaatgatataagttcttggaatcaattatctgatgactggcaacagcttataactcgcactttcactggattgactttattagatacaactcaatcaagtgtgggtgatgtagcccaaattaaaaattcacaaactgatatagagcaagctatctatgcaaattttgcttttatggttgctgtccatgcaagatcatatggaactattttttctactttatgtactagtgaacaaattgaagaagcgcatgaatgggtagttaataatgatgctttacaagcaagagctaaagcggtaattccgtattatacaggcaatgatccgcttaaatcaaaggttgccgcagcaattatgccagggttcctgctttatggtggtttttatttaccattttatttagctgcaagaggtaaattgcctaatactgctgatattattagattgatcttaagagataaggttattcacaattattatagtggttacaaatatcaattggccgtaaagaaattagctccagctaaacaagcagaaatgaaaaaattcgtttttgatttcttagataaactaattgatttggaaaagaaatatttgcacgagctttatgatgattttgatttggttgatgatgcaattcatttcagtttgtataatgcaggtaaatttttacaaaatttaggctatgatactccttttaccgcagaagaaacttatatttccccagaagtattcgctcaattatcagctcaagctgatgaaaaccatgatttcttttctggtaatggttcttcatatgtaatgggaacaggagaggagactaaagatgatgactgggatttctaaaaagccattagttgtctattattcttccacttcaaataatacagcacgctttgtagaaaagttagattgtaattctattaggattcctattaaactcagtaaagaaatttcagtttctgaagaatatattttaattacgccaacttattctggtggccatgggactacaggtgctgtgcctgagcaagttatccactttttgaacaaattggctaatcggcaaaaatgtattggtgttattgctagtggaaataccaattttggtaattcttttgccttggcaggggatgtaatttctaagaaattacatgttccttatctatataaatttgagttactgggaacaactgaagatgtaaataatgttaataaaataattgctgatgcaggtgaggacaatgactgatcatcttaataatgattcatatatttctttaaatgcacttgctaaatttaaagatgaaaaaggaaattataattttaaagctgacaaggaagctactaagcaatatcttgaaaatcatattgaaccaagaatgaaaaagtttgcttctttagaagaaaaattagcttatttagttgataataattactatgataaaaaagttctagatttatatacagctaaatttattaaagaaattttcaaattagcttatgcgcaaaattttagctttttgaactttatgggtgcagctaaattctataaagcatatgccttaaaaacaaacgataataaacaatttttagaacgttttgaagatcgggctgttatgaatgctttatttttagctgatggcaatgaagaactggccttgaatttagttaaagatattattagtaatcgtttccagccagcaactccgactttcttgaatgcaggtaaaaagagacgcggtgaatatgtttcatgttatttgctcagagttgaagacaatatggaatcaatttcacgagcaataagcacaagtctgcaattatctaaacgtggtggtggtgttgctctatgcttaactaatttgcgtgaattaggtgcacctattaaaaaaatgaagaatttatctagtgggataattcctgtaatgaaattactagaagattcattttcttatgccaatcaattagggcaaagacaaggtgccggtgcagtttatttaagtgcccatcatccccagattctgcaatttttagatactaaacgagaaaacgctgacgaaaaggtaagaattaaatctttatcacttggcgtagtgattccagatattacttttgaactagccaaagaaaataaaaagatggctttgttttcaccatatgatattaaacgtgaatatggtaaaccaatgtcagatatttcaattactaaagaataccaaaatctccttaataatccatgtattaaaaagacatttatcagtgctagaaaattcttccaaactattgctgaagttcaatttgaatcagggtatccctatattatgtatgaagatactgtcaatcgaagaaacccacaaaagaaattggggcggatcgtgatgtctaatttatgttcagaaattgctcaggttaatacgccaagtacctataatgaagacttaagttttaataagacgggctacgatgtttgttgtaatttaggatcacttaatattgcagcagcaatgaatagcgctgacaagttaggtggtttggtttctgatagtgttcaagcgcttaatcgtgttgccaggtcttcagatttagattgtgctccttcaattgaaaagggaaataaagctaatcgagcaatcggtctaggagcaatgaatttacatggctttttagcaactaatcatatttattatgattcaccagaagcagttgaatttacaggaattttcttttatacaattgcataccatgcatttaaagaatcaaataaattagctgaaaagtatggtgcttttaaaggattcaaagattcatcatatgctagtggtgattatttcaaaaaatttattgatgaggaagtctcaccgaaaacagacaagattaaagaaattgtagctaaatataaattagttattccaactaaagaagattgggaagaattgattactaaaattaaaaagacaggtatagctaatgctaacttgttagcagttgcacctactggatcaattagttatttatcttcatgtacaccaagtttgcagccagtagtagctcctgttgaaacacgcaaagaggctgatttgggtcgaatttatgtaccagcttataagattaataaagacaattatgagtattacgaaaagggtgcatatgaagtaggacctaatgctattattgatattacagctgctgcacaaaagtatgttgatcaatcaatttcgttaactttatttgttgaagataatgcaacaacaagagatttaaataaggcttatatttatgcctttaaaaagcgctgcaactcaatttattatgttagaataagagaaaaagttttagctggtagtgagaacttgactgcagacgaatgtttaattcaaaatggtgcagaatgccagaaatgtatgatttagtttaataatagaaaagcagctaaagtgtttattgatatgaaccccgaaattcggacaagaatttcggggtttttatttatgtctaaattatccaaacaagataaaattgatatttacaataattggaaaaattataatatatcagctaatcacgcagcagccgcatgtcatgccggtatgcctggcagctgtctaaatgaataattctgccggtaatgtctgtaatcgcctgggcaagttgcatattttgaagttcctaggtttcaaaaagataagattagaattgactttaatcccaatcattcgatgaatactccagctggtcaatggctacttagagaaattattgcaaaaattcaaaataagcattattcacgttgtgatgtagcttttgatatttataatgattctgagattcagtattatcaggtatggcgctggggaatgactaaaaagtttttctatggtaagaatggggaattgcaaacggtatatttcggcgcgcgttcaagtgagagacaaattcgtttgtataataaaaaaattgaacaagaacaaaggcatggacgaattgtaaatgttgattcactttggcgattagaaatgcagttgcgtggttcaaaaattgaaaattatgttcaggaagttagagaaatgctggaaaacttttatttgccagattgggaccatgaggaaaatttaaataggcaaatgatgatttatgcgttggttcataatcctgaattctatagtaaagcttctcgggcttctaagcagagatatagaaaaatgatttatgaagctaaaaagtcaaatagggtttctaaaattttagcgaaagaatttgtaaatcagtttgatattcttgaaggaactttgcaaaaaatgatgcagaggtatcatgctagaaatgttgaagttaaagagatagagcgtgataaggaacctgtagaatattctcaagagttaatttttcgagttaaaaaatatcgggaaattggcaaaagcacaagagaaattgcgtcgactttaggaattttggttgaaaatgttgaagaaattttagagttaaaaaatagaaattttgataactagactcaaaaatagagcaaaaaatgttacgtcttggacgtaatgagctacgtaagaatacgtcctgttcggatattacaaaaaaacattacgtatcaagacgtaatgtcaggtaaaagacgaacaatttagaagtatatagacgtcaaattaatcagaagtgatatcacttctaaaaatgcgaaatcgcttggtacaaccaagcccagcacaccttgataaaaggcgtggggtcagatttcccttatgctctttactagagataactaaaagaagcagattttagtcaaatttcagagtagaaactagaaggaaaactagaaactagaaatcagaggaaagaaaaattatggtaaaagttttaatccgtggaatcagcgaacaaaacttggctagaattgatcggattgttaatcaattaaatcaaaattcaagtaagaaaatttccagaaatcaatttttgagagaacaaattgaacaaattccaattaattttcaaaatcaaaatgaagattcgcaaactagtttattgattcagaagcagaataaacttctgcaggaaaatttattagggctgaatgttcttgcaaagtatttcattagtggagatgttaatgacaccgaacgagcattaaatttgttagatagtttgtcagaagacacggcaaaagaagatgattaaatttagaaagagggcaagaaatgggacgacagcactttttgcaatttcgactcaacgataagcaatgggaagaaattaggcagattagaaaagaacattgctttgataataatggtcaactttataagttcttattcttcaatgccatgttaggtgttcaaaaagaaaaagaactggaagagttacaaaaaattaatcaaaagattgataatgctttgaaaaaaagacaagaaacttacgctgattaagaggaccagaaaaaatgattaagacaacttttagagcgacaatttctgatacagatttagattggattcaagattataaagaggaacacgatttaaaaaataatgctgaagtaattcatcatcttatgaagttagcagaagaaaatgaaaaaaattctaagtggacaaaagatttaagtgatattagaaaacaacagcgatttaccaaagaacaagttgcaattctaacagaaatggtaagtcccggatttaaaattgaagtgcaacgctaagtgttaaacaaaaaggccatgaagacctaaacttgaagtgacgaaaaatcaaggaaggtgaatcttcatgaccaattcaaattctagcatctctagacattatcatcaattaaatagtgttaatcacaagtagtaaattatgtatttaatatatctaaatatgcctattaatgatataattgaccgcaaagaaagcaggtctatttttatgtcaagaatttataaagttggcgaagctgctaagcttctcggtgtatctcgctctaccatgcaaagatgggatcgagaaaaaagactagttgctcagcgcaatgttgccaatcgcagatactatacgcaagagcggctggatgcttttaggggcattaagcctcaccgcaagacagttgcttatgcccgtgtttcttctgtaggtcagaaagaaaatcttaggcatcagatggctttcatcattgaatatgccaatgctagaggcatcattattgatgaacatgtagaagatattggatcagggcttaattataaccgcaaaaaatggaataaattattggatgaagtagaagcaggaaaaatagaacgaatctttgttacctataaagatcgttttgcccgctttggctttgattggtttgaacatttttgtgctaagcacgatactaaaattattgttttaaacaaccctgaaacctctccagatgaggaaatggttgaagacttaatttcagtaattcatgtgttttcatgtcggctttatgggttgagacggtacggcaggaagattaggcgggatttaaagaaggaaggtgaaaagagtgatcatcaaaaccagaacatatcgattaaaacccaatcaaaggatgaagaaggttcttgattcgctttgtgattacagacgcttcagctggaatctcggtttagaaacctggcaaaatatgcatgaagccagacaattggctttaacccagcatcttaaagcagaacttaaaaagcctagaaaaaaacaaaagcttacaaacgctgaaagagaaattctcgcaaacaatcctgtcccttcctggcgcagaattcgtgatgagctgactgaaaacaagcaatactggcagacaaagcttccagctcatgtctttaatttggcgatccaagacttaggcaatgcttggcagaatttttttgataaagcgcagccaggctggggaaagccaaaattcaagtctaaaaaagcacctaggcagggatttaaaatggatcaggccaaaattaaggatggctgcttatttttagaaaagcctagggctgtcaaagaaacatggaacggctttaaattaagctctgctccattgtcggatgatttcggaacaatcagcttttacaaagaaaaaaacagatactatgcatccattccttttaaaatatctgatccagaagacaagcctaagacaggcagatatacaggcgtggatatcaatgttggacatttcaattacagagacggtcaatgcatagtaatgcccaaatcgttagcagcagtctattgcaaaatcaagcattatcaaagacagctgtctaaaaagcgtgtcgtcaatggtaaaatcaaaggaatgcaaagcaagcgctacatgaaagcgagaaacaagcttcaagcagcttacgctcgtgctaaaaatattcaaaatgatttgatgcagaaatttaccacaaagctggttagcgaatatgattctattgtgattgaagacctaagcgttaaaggaatgcttatgagtcatgttgcctccaaaggaatgcacaggtcaatgtttggcagatttagacagatattgacttataaatgcgaatggtatggcaagaaattgatcgtagccaataaactgtacccttcaactcaaaggtgcgcagcctgcggattagtgaaaaaaggcgatgaaaaaatcactttaagaggcaataagaagcatggcaccaagcataatgaatttgtttgttataatccgaactgccgtaactataataaaaaagttgaccgtgacgaaaacgccatgctcaacttaataattctggtaaaacatccagaattaaataaagccttataaaaagaatgcgggcgaagctacgtccgaaaaagaagtcaaaagagtcggtcaatgcgattactcccaagttggaatatcggaaaactgatgaagacgttgataagaaaagcataggcatgttaagccataatgactacaaataaatacaatgtagttgtttgcatatgtttttcatagctgctaatgaattgaaccagatgtacaagcaactaaaaaaacggataaattagaacttaaattagttcctgaattgtcaatttaagtgcaacagttaggttatgaagagatatattgcttgaagagttcttctgctgtgtgatattggaggattcggcgatgtttgtggttaatggcattagttgcctgttgaacatatgcagctgtcttatcgttcatgcttttgcctttagggaagaattgacgcagaagaccgttgcagttttcatttgtgcctctttcccaaggtgaatatggatgagcgaagtagatctgacagtttttaattttagtcatatctgcaaactcagaaccattatcaaaagtaatagtcttgaaccaatctggatgctggtctatttctttttgaagcagtctttgacaagtacttgctcgataatctggtattttgatgacaatttcaaaacgagtagttctttctgtcagagtcatcaaagcaggctgatttttacgtctaacgcctttaacccaatctccttcccagtgaagaggagttgctctgtcttcaacttctttaggacgctgctcaattgaattgccaagattctttttatgcaaagcatgcccaccatgactatgatgccgtttgtttctgcgtcttttaagcttcattggcagatcaatattgcttatatctagcaaaccgcgatcaatatagcgataaacggtaggcgtgctggggcaaggatagcctggcatcgtctgcttgaactcacccacaaactcatcaatgctggtagcatcaaatttagttttaaaccgcttagacagcattttcagaaaaacagcataatgctttaactgatcacgcttatagcagttcttgcgtcgcttatcatgatagatctgcgcagtatcggcatagtaatgctcatagagcagatagttatgatctctttgcaggacgctgccacgtctgatttcacggctaattgtcgatttgtgacagccaacttctcgagcaatagcggaacaggaggttatgcctaaatcaagcagagcttgtatttgtcctcgttgtacagctatgaaaaacatatgcaaacaactacattgtatttatttgtagtcattatggcttaacatgcctatgcttttcttatcaacgtcttcatcagttttccgatattccaacttgggagtaatcgcattgaccgactcttttgacttctttttcggacgtagcttcgcccgcattctttttataaggctttatttaattctggatgttttaccagaattattaagttgagcatggcgttttcgtcacggtcaacttttttattatagttacggcagttcggattataacaaacaaattcattatgcttggtgccatgcttcttattgcctcttaaagtgattttttcatcgccttttttcactaatccgcaggctgcgcacctttgagttgaagggtacagtttattggctacgatcaatttcttgccataccattcgcatttataagtcaatatctgtctaaatctgccaaacattgacctgtgcattcctttggaggcaacatgactcataagcattcctttaacgcttaggtcttcaatcacaatagaatcatattcgctaaccagctttgtggtaaatttctgcatcaaatcattttgaatatttttagcacgagcgtaagctgcttgaagcttgtttctcgctttcatgtagcgcttgctttgcattcctttgattttaccattgacgacacgctttttagacagctgtctttgataatgcttgattttgcaatagactgctgctaacgatttgggcattactatgcattgaccgtctctgtaattgaaatgtccaacattgatatccacgcctgtatatctgcctgtcttaggcttgtcttctggatcagatattttaaaaggaatggatgcatagtatctgtttttttctttgtaaaagctgattgttccgaaatcatccgacaatggagcagagcttaatttaaagccgttccatgtttctttgacagccctaggcttttctaaaaataagcagccatccttaattttggcctgatccattttaaatccctgcctaggtgcttttttagacttgaattttggctttccccagcctggctgcgctttatcaaaaaaattctgccaagcattgcctaagtcttggatcgccaaattaaagacatgagctggaagctttgtctgccagtattgcttgttttcagtcagctcatcacgaattctgcgccaggaagggacaggattgtttgcgagaatttctctttcagcgtttgtaagcttttgtttttttctaggctttttaagttctgctttaagatgctgggttaaagccaattgtctggcttcatgcatattttgccaggtttctaaaccgagattccagctgaagcgtctgtaatcacaaagcgaatcaagaaccttcttcatcctttgattgggttttaatcgatatgttctggttttgatgatcactcttttcaccttccttctttaaatcccgcctaatcttcctgccgtaccgtctcaacccataaagccgacatgaaaacacatgaattactgaaattaagtcttcaaccatttcctcatctggagaggtttcagggttgtttaaaacaataattttagtatcgtgcttagcacaaaaatgttcaaaccaatcaaagccaaagcgggcaaaacgatctttataggtaacaaagattcgttctatttttcctgcttctacttcatccaataatttattccattttttgcggttataattaagccctgatccaatatcttctacatgttcatcaataatgatgcctctagcattggcatattcaatgatgaaagccatctgatgcctaagattttctttctgacctacagaagaaacacgggcataagcaactgtcttgcggtgaggcttaatgcccctaaaagcatccagccgctcttgcgtatagtatctgcgattggcaacattgcgctgagcaactagtcttttttctcgatcccatctttgcatggtagagcgagatacaccgagaagcttagcagcttcgccaactttataaattcttgacataaaaatagacctgctttctttgcggtcaattatatcattaataggcatatttagatatattaaatacataatttactacttgtgattaacactatttaattgatgataatgtctagagatgctagaatttgaattggtcatgaagattcaccttccttgatttttcgtcacttcaagtttaggtcttcatggcctttttgtttaacacttagcgttgcacttcaattttaaatccgggacttaccatttctgttagaattgcaacttgttctttggtaaatcgctgttgttttctaatatcacttaaatcttttgtccacttagaatttttttcattttcttctgctaacttcataagatgatgaattacttcagcattattttttaaatcgtgttcctctttataatcttgaatccaatctaaatctgtatcagaaattgtcgctctaaaagttgtcttaatcattttttctggtcctcttaatcagcgtaagtttcttgtctttttttcaaagcattatcaatcttttgattaattttttgtaactcttccagttctttttctttttgaacacctaacatggcattgaagaataagaacttataaagttgaccattattatcaaagcaatgttcttttctaatctgcctaatttcttcccattgcttatcgttgagtcgaaattgcaaaaagtgctgtcgtcccatttcttgccctctttctaaatttaatcatcttcttttgccgtgtcttctgacaaactatctaacaaatttaatgctcgttcggtgtcattaacatctccactaatgaaatactttgcaagaacattcagccctaataaattttcctgcagaagtttattctgcttctgaatcaataaactagtttgcgaatcttcattttgattttgaaaattaattggaatttgttcaatttgttctctcaaaaattgatttctggaaattttcttacttgaattttgatttaattgattaacaatccgatcaattctagccaagttttgttcgctgattccacggattaaaacttttaccataatttttctttcctctgatttctagtttctagttttccttctagtttctactctgaaatttgactaaaatctgcttcttttagttatctctagtaaagagcataagggaaatctgaccccacgccttttatcaaggtgtgctgggcttggttgtaccaagcgatttcgcatttttagaagtgatatcacttctgattaatttgacgtctatatacttctaaattgttcgtcttttacctgacattacgtcttgatacgtaatgtttttttgtaatatccgaacaggacgtattcttacgtagctcattacgtccaagacgtaacattttttgctctatttttgagtctagttatcaaaatttctattttttaactctaaaatttcttcaacattttcaaccaaaattcctaaagtcgacgcaatttctcttgtgcttttgccaatttcccgatattttttaactcgaaaaattaactcttgagaatattctacaggttccttatcacgctctatctctttaacttcaacatttctagcatgatacctctgcatcattttttgcaaagttccttcaagaatatcaaactgatttacaaattctttcgctaaaattttagaaaccctatttgactttttagcttcataaatcatttttctatatctctgcttagaagcccgagaagctttactatagaattcaggattatgaaccaacgcataaatcatcatttgcctatttaaattttcctcatggtcccaatctggcaaataaaagttttccagcatttctctaacttcctgaacataattttcaatttttgaaccacgcaactgcatttctaatcgccaaagtgaatcaacatttacaattcgtccatgcctttgttcttgttcaatttttttattatacaaacgaatttgtctctcacttgaacgcgcgccgaaatataccgtttgcaattccccattcttaccatagaaaaactttttagtcattccccagcgccatacctgataatactgaatctcagaatcattataaatatcaaaagctacatcacaacgtgaataatgcttattttgaatttttgcaataatttctctaagtagccattgaccagctggagtattcatcgaatgattgggattaaagtcaattctaatcttatctttttgaaacctaggaacttcaaaatatgcaacttgcccaggcgattacagacattaccggcagaattattcatttagacagctgccaggcataccggcatgacatgcggctgctgcgtgattagctgatatattataatttttccaattattgtaaatatcaattttatcttgtttggataatttagacataaataaaaaccccgaaattcttgtccgaatttcggggttcatatcaataaacactttagctgcttttctattattaaactaaatcatacatttctggcattctgcaccattttgaattaaacattcgtctgcagtcaagttctcactaccagctaaaactttttctcttattctaacataataaattgagttgcagcgctttttaaaggcataaatataagccttatttaaatctcttgttgttgcattatcttcaacaaataaagttaacgaaattgattgatcaacatacttttgtgcagcagctgtaatatcaataatagcattaggtcctacttcatatgcacccttttcgtaatactcataattgtctttattaatcttataagctggtacataaattcgacccaaatcagcctctttgcgtgtttcaacaggagctactactggctgcaaacttggtgtacatgaagataaataactaattgatccagtaggtgcaactgctaacaagttagcattagctatacctgtctttttaattttagtaatcaattcttcccaatcttctttagttggaataactaatttatatttagctacaatttctttaatcttgtctgttttcggtgagacttcctcatcaataaattttttgaaataatcaccactagcatatgatgaatctttgaatcctttaaaagcaccatacttttcagctaatttatttgattctttaaatgcatggtatgcaattgtataaaagaaaattcctgtaaattcaactgcttctggtgaatcataataaatatgattagttgctaaaaagccatgtaaattcattgctcctagaccgattgctcgattagctttatttcccttttcaattgaaggagcacaatctaaatctgaagacctggcaacacgattaagcgcttgaacactatcagaaaccaaaccacctaacttgtcagcgctattcattgctgctgcaatattaagtgatcctaaattacaacaaacatcgtagcccgtcttattaaaacttaagtcttcattataggtacttggcgtattaacctgagcaatttctgaacataaattagacatcacgatccgccccaatttcttttgtgggtttcttcgattgacagtatcttcatacataatatagggataccctgattcaaattgaacttcagcaatagtttggaagaattttctagcactgataaatgtctttttaatacatggattattaaggagattttggtattctttagtaattgaaatatctgacattggtttaccatattcacgtttaatatcatatggtgaaaacaaagccatctttttattttctttggctagttcaaaagtaatatctggaatcactacgccaagtgataaagatttaattcttaccttttcgtcagcgttttctcgtttagtatctaaaaattgcagaatctggggatgatgggcacttaaataaactgcaccggcaccttgtctttgccctaattgattggcataagaaaatgaatcttctagtaatttcattacaggaattatcccactagataaattcttcatttttttaataggtgcacctaattcacgcaaattagttaagcatagagcaacaccaccaccacgtttagataattgcagacttgtgcttattgctcgtgaaattgattccatattgtcttcaactctgagcaaataacatgaaacatattcaccgcgtctctttttacctgcattcaagaaagtcggagttgctggctggaaacgattactaataatatctttaactaaattcaaggccagttcttcattgccatcagctaaaaataaagcattcataacagcccgatcttcaaaacgttctaaaaattgtttattatcgtttgtttttaaggcatatgctttatagaatttagctgcacccataaagttcaaaaagctaaaattttgcgcataagctaatttgaaaatttctttaataaatttagctgtatataaatctagaacttttttatcatagtaattattatcaactaaataagctaatttttcttctaaagaagcaaactttttcattcttggttcaatatgattttcaagatattgcttagtagcttccttgtcagctttaaaattataatttcctttttcatctttaaatttagcaagtgcatttaaagaaatatatgaatcattattaagatgatcagtcattgtcctcacctgcatcagcaattattttattaacattatttacatcttcagttgttcccagtaactcaaatttatatagataaggaacatgtaatttcttagaaattacatcccctgccaaggcaaaagaattaccaaaattggtatttccactagcaataacaccaatacatttttgccgattagccaatttgttcaaaaagtggataacttgctcaggcacagcacctgtagtcccatggccaccagaataagttggcgtaattaaaatatattcttcagaaactgaaatttctttactgagtttaataggaatcctaatagaattacaatctaacttttctacaaagcgtgctgtattatttgaagtggaagaataatagacaactaatggctttttagaaatcccagtcatcatctttagtctcctctcctgttcccattacatatgaagaaccattaccagaaaagaaatcatggttttcatcagcttgagctgataattgagcgaatacttctggggaaatataagtttcttctgcggtaaaaggagtatcatagcctaaattttgtaaaaatttacctgcattatacaaactgaaatgaattgcatcatcaaccaaatcaaaatcatcataaagctcgtgcaaatatttcttttccaaatcaattagtttatctaagaaatcaaaaacgaattttttcatttctgcttgtttagctggagctaatttctttacggccaattgatatttgtaaccactataataattgtgaataaccttatctcttaagatcaatctaataatatcagcagtattaggcaatttacctcttgcagctaaataaaatggtaaataaaaaccaccataaagcaggaaccctggcataattgctgcggcaacctttgatttaagcggatcattgcctgtataatacggaattaccgctttagctcttgcttgtaaagcatcattattaactacccattcatgcgcttcttcaatttgttcactagtacataaagtagaaaaaatagttccatatgatcttgcatggacagcaaccataaaagcaaaatttgcatagatagcttgctctatatcagtttgtgaatttttaatttgggctacatcacccacacttgattgagttgtatctaataaagtcaatccagtgaaagtgcgagttataagctgttgccagtcatcagataattgattccaagaacttatatcattcgaaactgggattttttcaggtaaccaaaagttttgagtaactctgttccaaacctcaagatccttatcatctttaatgtcattccagttaatagctcgcatatttttgccgttgttattgtaagcaaattcaactggtgactgtgaatgatcataataactcatatttgtatttgctcctatcattatttattgttttatctaatatttgtgtgaacataatatagcatcttctgctcaataatacaacatgtggatttttggctatttataatcaatatattgtggctaagccgttttgataatacaaaattattttcaaatttattttatcttccaaaaataatgtaggtgttgttttttgcttttttgacaaaaaaatctccctgaattgtcaaattaagtgcaacagttaggctatgaagagatatactgcttgaagagttcttctgctgatagcgctgaaatttcaaatagaattaataccgataacgatcaggatcaggatcagcaaggtgataatgcggaaacaaattttgaatattccgatgatcgtgatggagatgaccaataaataattaaaaaaaggagtagacaaaatagcattaagtcagaaattagctttgaataatgattttcaaaacaaaaaagccctgctattatgcagagccaccgcgcgttcgcaagttatcgtcttgctgcgcatgcatccatgatcattggacgcgacaattttcctacatgtattataacatgctaaaataaaaatgcatgtcattcatgcacattctagggttggctcaatcaaccaccctataggaggtgagagacgttggacgacatgacaattttcctaatttgcgttctgctacatgagctccatttagttcttcgggaactaaataatctacttgataagtagtcatcattagtagacgcgaccagagtcatcggcagttgtatagtcggtgacttttttattttgcattctttaattctctaaagcgtcgataaattggtgttttggagatccctaatttcttgctgatttcagaatagctcctgtatgcaacctccaggcaaaatcaatttgttctggagtgtactttcgaagcataccatcatggaggttggtattattagctttcgctcatgccttgttttcccaagatgaaaaagtgcgacagatcaacgcttttttatttttttggtcaaattttagaaatatgctaaataaaaaaagcggtcaaacgaccgcccacgttttgcatgcctcgttcatgtcgacagcataacactaatcctttaatcattataacatgataaaatagttatggcatgcttttgtgcccctacactgctgtaaaaggctagaaaggagctgtatcatgtcagatgttgtaacactaatcctaacaatcgcacttttgaatgaattacatttagtccttcacgaactaaaccagctattaaagcactagtgcaaaaagtcgtccttcggggcggcttttttgtctcttaactctctaaaacgccggtagatagttgcttttgacatacctaatttccgactgatttcagaatagctcatgtggtcttgagtatggagcttccacgcaaaatcaatttgttctgaggtgtactttcgaggcataccatcatggaagttaggattattggcttttgcccatgccttgccttcctgggttcggttcacgataagatcacgttcaaattctgcaaatgcactgaatacagtgaagattagacggccacttggtgaattatcaatcgtaccaatatttaagacgcgtagaatgattccctcagcatttaattgtttaacaatgttcaatgcgtcctgagtattacgtgctagtcgatctaatttggtgacaattagggtatcaccactaccaatttgagccatcaatttatcgaattctggtcgatttgctgtggtgcctgtgtatttatccttaaagattttggtcgctcctgcctgttttaggtcttcaacttgagttgcatagtcctgctgagtagttgaaacacgagcatagccataaatggtatttgtcatatatttcctttcaattatgaatacaagttatgaatatggcttatgccctatcttagaagattctacttttgtattcaagactttcaacttttgattacaaaacaaaaagcagtttctaaaaagaaactgcttaagtattattattttcaataattaccatttaatgttagaaatagaagatcaaaagtagagaatgaaaatgtaaaagtaggagtagagaataaaaatgagaaaaaagggctggctctttctaacagccagtcagagtactcaaatctgagacaaaatgtaaaaattagcatagatcgattaacaattgttggagatttttcgacagagctttttaaaaaattagttcgtaaatggctgactttttcttttattagatcttcgggagctggttttgaggtattagattattcaaattgcaggtttgatgatttcggtaatccacatgaggaaattccgcctgggcttttaaaacgtgctgttttttcttgccggaataataagctgcttgtctttttttgggcgttgaatctttacttcagtggcatcgattaagacaacatcgtctggcttgatttcttgcttgccaatgttaaagccatgcttagccaaagtctcttcggcccagtggcttcttctgatcaggttgctgtcatgcacaccgtaatcggcagctatttgttcataagtacggtattccttgaggtactgcaaagtagccagaagcaggtcttcaattgccagcttgagctttctgccgcctcgggcatgcttgacttgatattcggcttttaatactttgaccatttcgtcaaagacaggcttggcaacgccgatcagacgcttgaatctggtattgtttaaatttttagctgtttcgtatttcataatttaagattatagcagatgtttcgcagtaactctattaactaaagaaacaaataatgaaaggcatggttggctttggaaaataacgcattagctaataacgtcaaaatacgctgaactgagtttgtcgaaataccggtgagactggcgatagtcttagccgggagtgatttactggctagcttcagcacatgagtcgctagtccgtgaccgatggcgtggttggttgataccactggagtggtggccgtacaagtgctatggcagttactacaacgccagcgttgcttgtttagctctagaattacgggccggtccatggatcctgcaatgtggacatgagtgagcttgtgtccgttagggtgcaacatattgtatccacagctgggacagcgcctgagtgttaatcacaagtagtaaattatgtatttaatatatctaaatatgcctattaatgatataattgaccgcaaagaaagcaggtctatttttatgtcaagaatttataaagttggcgaagctgctaagcttctcggtgtatctcgctctaccatgcaaagatgggatcgagaaaaaagactagttgctcagcgcaatgttgccaatcgcagatactatacgcaagagcggctggatgcttttaggggcattaagcctcaccgcaagacagttgcttatgcccgtgtttcttctgtaggtcagaaagaaaatcttaggcatcagatggctttcatcattgaatatgccaatgctagaggcatcattattgatgaacatgtagaagatattggatcagggcttaattataaccgcaaaaaatggaataaattattggatgaagtagaagcaggaaaaatagaacgaatctttgttacctataaagatcgttttgcccgctttggctttgattggtttgaacatttttgtgctaagcacgatactaaaattattgttttaaacaaccctgaaacctctccagatgaggaaatggttgaagacttaatttcagtaattcatgtgttttcatgtcggctttatgggttgagacggtacggcaggaagattaggcgggatttaaagaaggaaggtgaaaagagtgatcatcaaaaccagaacatatcgattaaaacccaatcaaaggatgaagaaggttcttgattcgctttgtgattacagacgcttcagctggaatctcggtttagaaacctggcaaaatatgcatgaagccagacaattggctttaacccagcatcttaaagcagaacttaaaaagcctagaaaaaaacaaaagcttacaaacgctgaaagagaaattctcgcaaacaatcctgtcccttcctggcgcagaattcgtgatgagctgactgaaaacaagcaatactggcagacaaagcttccagctcatgtctttaatttggcgatccaagacttaggcaatgcttggcagaatttttttgataaagcgcagccaggctggggaaagccaaaattcaagtctaaaaaagcacctaggcagggatttaaaatggatcaggccaaaattaaggatggctgcttatttttagaaaagcctagggctgtcaaagaaacatggaacggctttaaattaagctctgctccattgtcggatgatttcggaacaatcagcttttacaaagaaaaaaacagatactatgcatccattccttttaaaatatctgatccagaagacaagcctaagacaggcagatatacaggcgtggatatcaatgttggacatttcaattacagagacggtcaatgcatagtaatgcccaaatcgttagcagcagtctattgcaaaatcaagcattatcaaagacagctgtctaaaaagcgtgtcgtcaatggtaaaatcaaaggaatgcaaagcaagcgctacatgaaagcgagaaacaagcttcaagcagcttacgctcgtgctaaaaatattcaaaatgatttgatgcagaaatttaccacaaagctggttagcgaatatgattctattgtgattgaagacctaagcgttaaaggaatgcttatgagtcatgttgcctccaaaggaatgcacaggtcaatgtttggcagatttagacagatattgacttataaatgcgaatggtatggcaagaaattgatcgtagccaataaactgtacccttcaactcaaaggtgcgcagcctgcggattagtgaaaaaaggcgatgaaaaaatcactttaagaggcaataagaagcatggcaccaagcataatgaatttgtttgttataatccgaactgccgtaactataataaaaaagttgaccgtgacgaaaacgccatgctcaacttaataattctggtaaaacatccagaattaaataaagccttataaaaagaatgcgggcgaagctacgtccgaaaaagaagtcaaaagagtcggtcaatgcgattactcccaagttggaatatcggaaaactgatgaagacgttgataagaaaagcataggcatgttaagccataatgactacaaataaatacaatgtagttgtttgcatatgtttttcatagctgtgtaggtaagctctgcctggatgaccaaatactttttgcgacccgagccccgaccatgaaattcctcacgagtaccgaacacccgaatgtttgtgtctgtaactcccagtaatttaagtgtattatctagttgagacatctattcctacccccgcttatcttgagtttcgtcgcttaaagcatagcactagggaggcttagatgcctttttttgttatcaaaaagggcctagtacttttggaatggaaatactttccaacaccaaaaattctagacccctaaatttgcgatctaccacgtatgtttaaatcaaatttattttaaatataccttgtacagtgaagtttattgattgtgtgatttatgataaaagattaatcttttatcataaatcacacaatcagtaatacataagttaagctcaatcttatttacgtttggcaaggccttcacgaataattttttctaagacatcaacaatttttttgtcattctcaaaagcgatgcgtttaacttctttatatgtgctcatgcgaagttgaacggttttagttctttctgtttcgaattggtatggactttttagatttttaagttgttcagatgcctttttactaactttgtttaaaaaatcttctgccatgataaattactcctctaactgttgaattctaagtagttgttcattaagaaccatttggtacatttggattgctcttttatcccaatggtctttattccgtattccttcattagcaaacgttttaacccgttcttgagttctaattgagtttgaaaagaccccttcgccaaaaaagtcttttgcttgtgcagaaatttcagtatcaacttttgcacgtggcttcattaagtacaatatgacaccaactaactgaaaacttccattgtattgttcacgtagttcacctaaatgcgtagctgtttttaaagaacttgtatatgactgcttttgagtttgtaagacaattgagatgaaatctgaagccatgattgcgttattagtaaagacatttattgttggtggtacgtcaataaaaatataatcgtaattttgttttaattttgaaagcatttgtggtaatagaatattacgtttaacccgactaactttttctacagcaccaatccataaagacaatgtccaatctgtaggaatcatatcaatttggtttgtaacagacacaatagatttagacaaattccctccaagaaggccctcatataatgaaagttccggctttaaatcggctttataagtctccttcataatttcagttgcatttccctggggatcgaaatctatcagtagtacttttttcccctcttgacccaataaataggtttccattacagtcaaggtggtcttaccaacgccacctttaaagttgaagtttaatagtgttttcccattcatagtagcacctacctttacataaacattttaccatgatttatgattaatcgcaaattttatatgatttatgattaatcataaatcatatccatgaaaatatttacttaacctttgcagaatgatatgctttgttcataaacaaaaaatcccaatacactcgggattgggatttttgcagtattgacaagtagctatcttgcagctacctagtccaagcaattttcaccgccgagttaaaattgcttgaacaaattgtaatcttgtttacgtgctaattataccgcaagcaaaccttaaagggcaagcaaaggtaaactaattaaaacgaagacaagaccaatggactaagtagcttctaataactacttagtccatttttagttcttaaaaattaaaaaagttgccgactgggcaacccagaatagacacatgctggtgaaactacaaagccgatcacgaccaatatccgctttgtaattctattaaagcatatcagatttgtattttaaagcaagtcagatgttttagcaactctcttttgagacagcgtgtgtcagtcaagaaagggagtttttatt
